United States Patent Application Publication US 2007/0111227 A1 - sequence listing, part 5

SEQ ID NO: 158260 - DNA, 17 bp, Arabidopsis thaliana
tgtgaaagactctctgt

SEQ ID NO: 158261 - DNA, 17 bp, Arabidopsis thaliana
tgtgaaagagaaacgtg

SEQ ID NO: 158262 - DNA, 17 bp, Arabidopsis thaliana
tgtgaaagccatggaag

SEQ ID NO: 158263 - DNA, 17 bp, Arabidopsis thaliana
tgtgaaatccttccaga

SEQ ID NO: 158264 - DNA, 17 bp, Arabidopsis thaliana
tgtgaaatctaaccgga

SEQ ID NO: 158265 - DNA, 17 bp, Arabidopsis thaliana
tgtgaaatctatttcgt

SEQ ID NO: 158266 - DNA, 17 bp, Arabidopsis thaliana
tgtgaaatcttcggccc

SEQ ID NO: 158267 - DNA, 17 bp, Arabidopsis thaliana
tgtgaaatgacttgaga

SEQ ID NO: 158268 - DNA, 17 bp, Arabidopsis thaliana
tgtgaaatttactttgc

SEQ ID NO: 158269 - DNA, 17 bp, Arabidopsis thaliana
tgtgaaccagggctctc

SEQ ID NO: 158270 - DNA, 17 bp, Arabidopsis thaliana
tgtgaaccgctcctgca

SEQ ID NO: 158271 - DNA, 17 bp, Arabidopsis thaliana
tgtgaacctaattgggg

SEQ ID NO: 158272 - DNA, 17 bp, Arabidopsis thaliana
tgtgaacctatgatttt

SEQ ID NO: 158273 - DNA, 17 bp, Arabidopsis thaliana
tgtgaacgaaattgccc

SEQ ID NO: 158274 - DNA, 17 bp, Arabidopsis thaliana
tgtgaacgatctgtggc

SEQ ID NO: 158275 - DNA, 17 bp, Arabidopsis thaliana
tgtgaacgatctgtgtc

SEQ ID NO: 158276 - DNA, 17 bp, Arabidopsis thaliana
tgtgaacgatctgtgtt

SEQ ID NO: 158277 - DNA, 17 bp, Arabidopsis thaliana
tgtgaacggcacttgca

SEQ ID NO: 158278 - DNA, 17 bp, Arabidopsis thaliana
tgtgaactagctacgaa

SEQ ID NO: 158279 - DNA, 17 bp, Arabidopsis thaliana
tgtgaactcatccttat

SEQ ID NO: 158280 - DNA, 17 bp, Arabidopsis thaliana
tgtgaactgttttgggt

SEQ ID NO: 158281 - DNA, 17 bp, Arabidopsis thaliana
tgtgaacttcgcatgtg

SEQ ID NO: 158282 - DNA, 17 bp, Arabidopsis thaliana
tgtgaacttttctccga

SEQ ID NO: 158283 - DNA, 17 bp, Arabidopsis thaliana
tgtgaactttttgctgc

SEQ ID NO: 158284 - DNA, 17 bp, Arabidopsis thaliana
tgtgaagacacttcctc

SEQ ID NO: 158285 - DNA, 17 bp, Arabidopsis thaliana
tgtgaagactctagata

SEQ ID NO: 158286 - DNA, 17 bp, Arabidopsis thaliana
tgtgaagagacccactt

SEQ ID NO: 158287 - DNA, 17 bp, Arabidopsis thaliana
tgtgaagaggatctaaa

SEQ ID NO: 158288 - DNA, 17 bp, Arabidopsis thaliana
tgtgaaggcagccaagg

SEQ ID NO: 158289 - DNA, 17 bp, Arabidopsis thaliana
tgtgaataatgaaatct

SEQ ID NO: 158290 - DNA, 17 bp, Arabidopsis thaliana
tgtgaatagtctgaacc

SEQ ID NO: 158291 - DNA, 17 bp, Arabidopsis thaliana
tgtgaatccctcagtgt

SEQ ID NO: 158292 - DNA, 17 bp, Arabidopsis thaliana
tgtgaatcctggaatct

SEQ ID NO: 158293 - DNA, 17 bp, Arabidopsis thaliana
tgtgaatccttcgtcag

SEQ ID NO: 158294 - DNA, 17 bp, Arabidopsis thaliana
tgtgaatcgatttgccc

SEQ ID NO: 158295 - DNA, 17 bp, Arabidopsis thaliana
tgtgaatgaagcaccac

SEQ ID NO: 158296 - DNA, 17 bp, Arabidopsis thaliana
tgtgaatgatataactg

SEQ ID NO: 158297 - DNA, 17 bp, Arabidopsis thaliana
tgtgaatgccatattga

SEQ ID NO: 158298 - DNA, 17 bp, Arabidopsis thaliana
tgtgaatgcgctttgaa

SEQ ID NO: 158299 - DNA, 17 bp, Arabidopsis thaliana
tgtgaatgtttacggcg

SEQ ID NO: 158300 - DNA, 17 bp, Arabidopsis thaliana
tgtgaatgttttggact

SEQ ID NO: 158301 - DNA, 17 bp, Arabidopsis thaliana
tgtgaattacgcgttga

SEQ ID NO: 158302 - DNA, 17 bp, Arabidopsis thaliana
tgtgaattcaccatcgc

SEQ ID NO: 158303 - DNA, 17 bp, Arabidopsis thaliana
tgtgaattcgcaaagtt

SEQ ID NO: 158304 - DNA, 17 bp, Arabidopsis thaliana
tgtgaattcttccttgt

SEQ ID NO: 158305 - DNA, 17 bp, Arabidopsis thaliana
tgtgaattgcagaatcc

SEQ ID NO: 158306 - DNA, 17 bp, Arabidopsis thaliana
tgtgaattgggcctaac

SEQ ID NO: 158307 - DNA, 17 bp, Arabidopsis thaliana
tgtgaattgtttgggct

SEQ ID NO: 158308 - DNA, 17 bp, Arabidopsis thaliana
tgtgaatttcccatagt

SEQ ID NO: 158309 - DNA, 17 bp, Arabidopsis thaliana
tgtgaattttgtgctgc

SEQ ID NO: 158310 - DNA, 17 bp, Arabidopsis thaliana
tgtgacaatctcgtgtt

SEQ ID NO: 158311 - DNA, 17 bp, Arabidopsis thaliana
tgtgacacattgatgtt

SEQ ID NO: 158312 - DNA, 17 bp, Arabidopsis thaliana
tgtgacacgtttaggca

SEQ ID NO: 158313 - DNA, 17 bp, Arabidopsis thaliana
tgtgacactatcatcgg

SEQ ID NO: 158314 - DNA, 17 bp, Arabidopsis thaliana
tgtgacactcactggtg

SEQ ID NO: 158315 - DNA, 17 bp, Arabidopsis thaliana
tgtgacactcattgatg

SEQ ID NO: 158316 - DNA, 17 bp, Arabidopsis thaliana
tgtgacacttaggtgga

SEQ ID NO: 158317 - DNA, 17 bp, Arabidopsis thaliana
tgtgacagccaagcgtt

SEQ ID NO: 158318 - DNA, 17 bp, Arabidopsis thaliana
tgtgacagttaagcagg

SEQ ID NO: 158319 - DNA, 17 bp, Arabidopsis thaliana
tgtgacagttgagcagg

SEQ ID NO: 158320 - DNA, 17 bp, Arabidopsis thaliana
tgtgacatctactgtcc

SEQ ID NO: 158321 - DNA, 17 bp, Arabidopsis thaliana
tgtgaccaacaatctca

SEQ ID NO: 158322 - DNA, 17 bp, Arabidopsis thaliana
tgtgaccaaccccgtcc

SEQ ID NO: 158323 - DNA, 17 bp, Arabidopsis thaliana
tgtgaccaatggcccca

SEQ ID NO: 158324 - DNA, 17 bp, Arabidopsis thaliana
tgtgaccagccccaagg

SEQ ID NO: 158325 - DNA, 17 bp, Arabidopsis thaliana
tgtgaccatcactctcg

SEQ ID NO: 158326 - DNA, 17 bp, Arabidopsis thaliana
tgtgaccatcggagctt

SEQ ID NO: 158327 - DNA, 17 bp, Arabidopsis thaliana
tgtgaccattggagcag

SEQ ID NO: 158328 - DNA, 17 bp, Arabidopsis thaliana
tgtgaccctgttgagct

SEQ ID NO: 158329 - DNA, 17 bp, Arabidopsis thaliana
tgtgaccgctcggcagg

SEQ ID NO: 158330 - DNA, 17 bp, Arabidopsis thaliana
tgtgaccggtggtccca

SEQ ID NO: 158331 - DNA, 17 bp, Arabidopsis thaliana
tgtgaccgttgctcatc

SEQ ID NO: 158332 - DNA, 17 bp, Arabidopsis thaliana
tgtgacctcagcggtta

SEQ ID NO: 158333 - DNA, 17 bp, Arabidopsis thaliana
tgtgacctccatttttt

SEQ ID NO: 158334 - DNA, 17 bp, Arabidopsis thaliana
tgtgacctttgcaggtt

SEQ ID NO: 158335 - DNA, 17 bp, Arabidopsis thaliana
tgtgacgacaaggtcaa

SEQ ID NO: 158336 - DNA, 17 bp, Arabidopsis thaliana
tgtgacgacaatacggt

SEQ ID NO: 158337 - DNA, 17 bp, Arabidopsis thaliana
tgtgacgagagagtttg

SEQ ID NO: 158338 - DNA, 17 bp, Arabidopsis thaliana
tgtgacgatgtgttgac

SEQ ID NO: 158339 - DNA, 17 bp, Arabidopsis thaliana
tgtgacgatgtgttggc

SEQ ID NO: 158340 - DNA, 17 bp, Arabidopsis thaliana
tgtgacgattcaggagc

SEQ ID NO: 158341 - DNA, 17 bp, Arabidopsis thaliana
tgtgacgcaaccaaggt

SEQ ID NO: 158342 - DNA, 17 bp, Arabidopsis thaliana
tgtgacgcactgtgtcg

SEQ ID NO: 158343 - DNA, 17 bp, Arabidopsis thaliana
tgtgacggcggagaagg

SEQ ID NO: 158344 - DNA, 17 bp, Arabidopsis thaliana
tgtgacggctgagttat

SEQ ID NO: 158345 - DNA, 17 bp, Arabidopsis thaliana
tgtgacggtttgttgtc

SEQ ID NO: 158346 - DNA, 17 bp, Arabidopsis thaliana
tgtgacgttgcaccggc

SEQ ID NO: 158347 - DNA, 17 bp, Arabidopsis thaliana
tgtgactaaacgcgttc

SEQ ID NO: 158348 - DNA, 17 bp, Arabidopsis thaliana
tgtgactaaatccaggt

SEQ ID NO: 158349 - DNA, 17 bp, Arabidopsis thaliana
tgtgactacaatttttc

SEQ ID NO: 158350 - DNA, 17 bp, Arabidopsis thaliana
tgtgactagttgagctt

SEQ ID NO: 158351 - DNA, 17 bp, Arabidopsis thaliana
tgtgactcagactatgc

SEQ ID NO: 158352 - DNA, 17 bp, Arabidopsis thaliana
tgtgactccaaattatg

SEQ ID NO: 158353 - DNA, 17 bp, Arabidopsis thaliana
tgtgactggacctgtca

SEQ ID NO: 158354 - DNA, 17 bp, Arabidopsis thaliana
tgtgactggttcgacgc

SEQ ID NO: 158355 - DNA, 17 bp, Arabidopsis thaliana
tgtgactggttcgtcgc

SEQ ID NO: 158356 - DNA, 17 bp, Arabidopsis thaliana
tgtgactgtgttgccaa

SEQ ID NO: 158357 - DNA, 17 bp, Arabidopsis thaliana
tgtgactgttaggagta

SEQ ID NO: 158358 - DNA, 17 bp, Arabidopsis thaliana
tgtgacttattggtacc

SEQ ID NO: 158359 - DNA, 17 bp, Arabidopsis thaliana
tgtgacttatttacaat

SEQ ID NO: 158360 - DNA, 17 bp, Arabidopsis thaliana
tgtgacttatttacagt

SEQ ID NO: 158361 - DNA, 17 bp, Arabidopsis thaliana
tgtgacttgacatcaca

SEQ ID NO: 158362 - DNA, 17 bp, Arabidopsis thaliana
tgtgacttgccgtttcg

SEQ ID NO: 158363 - DNA, 17 bp, Arabidopsis thaliana
tgtgacttttgagattg

SEQ ID NO: 158364 - DNA, 17 bp, Arabidopsis thaliana
tgtgagaattttcaggt

SEQ ID NO: 158365 - DNA, 17 bp, Arabidopsis thaliana
tgtgagacaccagttcc

SEQ ID NO: 158366 - DNA, 17 bp, Arabidopsis thaliana
tgtgagacattcccgtg

SEQ ID NO: 158367 - DNA, 17 bp, Arabidopsis thaliana
tgtgagacgatgtgaaa

SEQ ID NO: 158368 - DNA, 17 bp, Arabidopsis thaliana
tgtgagacggacgtcga

SEQ ID NO: 158369 - DNA, 17 bp, Arabidopsis thaliana
tgtgagacgtcgctgcc

SEQ ID NO: 158370 - DNA, 17 bp, Arabidopsis thaliana
tgtgagaggaccagggt

SEQ ID NO: 158371 - DNA, 17 bp, Arabidopsis thaliana
tgtgagatactggagct

SEQ ID NO: 158372 - DNA, 17 bp, Arabidopsis thaliana
tgtgagatggattgacc

SEQ ID NO: 158373 - DNA, 17 bp, Arabidopsis thaliana
tgtgagatggattgatt

SEQ ID NO: 158374 - DNA, 17 bp, Arabidopsis thaliana
tgtgagattacgggttt

SEQ ID NO: 158375 - DNA, 17 bp, Arabidopsis thaliana
tgtgagattcgctcgga

SEQ ID NO: 158376 - DNA, 17 bp, Arabidopsis thaliana
tgtgagatttggtcgtc

SEQ ID NO: 158377 - DNA, 17 bp, Arabidopsis thaliana
tgtgagcatgcctgtcg

SEQ ID NO: 158378 - DNA, 17 bp, Arabidopsis thaliana
tgtgagcatgcttgtcg

SEQ ID NO: 158379 - DNA, 17 bp, Arabidopsis thaliana
tgtgagcctgtatacca

SEQ ID NO: 158380 - DNA, 17 bp, Arabidopsis thaliana
tgtgagctttacggggg

SEQ ID NO: 158381 - DNA, 17 bp, Arabidopsis thaliana
tgtgaggatttctcatg

SEQ ID NO: 158382 - DNA, 17 bp, Arabidopsis thaliana
tgtgaggggtacggtgg

SEQ ID NO: 158383 - DNA, 17 bp, Arabidopsis thaliana
tgtgaggtctgctgctt

SEQ ID NO: 158384 - DNA, 17 bp, Arabidopsis thaliana
tgtgagtcttgtgctga

SEQ ID NO: 158385 - DNA, 17 bp, Arabidopsis thaliana
tgtgagtgcgcagtcca

SEQ ID NO: 158386 - DNA, 17 bp, Arabidopsis thaliana
tgtgagtgtttggatca

SEQ ID NO: 158387 - DNA, 17 bp, Arabidopsis thaliana
tgtgataatacagctgc

SEQ ID NO: 158388 - DNA, 17 bp, Arabidopsis thaliana
tgtgataatgcccaaat

SEQ ID NO: 158389 - DNA, 17 bp, Arabidopsis thaliana
tgtgataccttttcgga

SEQ ID NO: 158390 - DNA, 17 bp, Arabidopsis thaliana
tgtgatacgattttggg

SEQ ID NO: 158391 - DNA, 17 bp, Arabidopsis thaliana
tgtgatatccagtgttc

SEQ ID NO: 158392 - DNA, 17 bp, Arabidopsis thaliana
tgtgatatgtccgagtg

SEQ ID NO: 158393 - DNA, 17 bp, Arabidopsis thaliana
tgtgatattgtcctttt

SEQ ID NO: 158394 - DNA, 17 bp, Arabidopsis thaliana
tgtgatcaccggcttgt

SEQ ID NO: 158395 - DNA, 17 bp, Arabidopsis thaliana
tgtgatcatctcatgcg

SEQ ID NO: 158396 - DNA, 17 bp, Arabidopsis thaliana
tgtgatccgatttgcct

SEQ ID NO: 158397 - DNA, 17 bp, Arabidopsis thaliana
tgtgatccgcagagatc

SEQ ID NO: 158398 - DNA, 17 bp, Arabidopsis thaliana
tgtgatccgtcaagtct

SEQ ID NO: 158399 - DNA, 17 bp, Arabidopsis thaliana
tgtgatccgtccactgc

SEQ ID NO: 158400 - DNA, 17 bp, Arabidopsis thaliana
tgtgatcgtggtggttg

SEQ ID NO: 158401 - DNA, 17 bp, Arabidopsis thaliana
tgtgatctttgcaggtt

SEQ ID NO: 158402 - DNA, 17 bp, Arabidopsis thaliana
tgtgatctttgtagggt

SEQ ID NO: 158403 - DNA, 17 bp, Arabidopsis thaliana
tgtgatgaagtcgcagc

SEQ ID NO: 158404 - DNA, 17 bp, Arabidopsis thaliana
tgtgatgactgtagccg

SEQ ID NO: 158405 - DNA, 17 bp, Arabidopsis thaliana
tgtgatgacttgcgttg

SEQ ID NO: 158406 - DNA, 17 bp, Arabidopsis thaliana
tgtgatgacttggctcc

SEQ ID NO: 158407 - DNA, 17 bp, Arabidopsis thaliana
tgtgatgatttgtagga

SEQ ID NO: 158408 - DNA, 17 bp, Arabidopsis thaliana
tgtgatgcagttctcgc

SEQ ID NO: 158409 - DNA, 17 bp, Arabidopsis thaliana
tgtgatgcccttagatg

SEQ ID NO: 158410 - DNA, 17 bp, Arabidopsis thaliana
tgtgatggactccaacc

SEQ ID NO: 158411 - DNA, 17 bp, Arabidopsis thaliana
tgtgatgggccgagcag

SEQ ID NO: 158412 - DNA, 17 bp, Arabidopsis thaliana
tgtgatggttgtagctg

SEQ ID NO: 158413 - DNA, 17 bp, Arabidopsis thaliana
tgtgatgtggatggatg

SEQ ID NO: 158414 - DNA, 17 bp, Arabidopsis thaliana
tgtgattaagataccgg

SEQ ID NO: 158415 - DNA, 17 bp, Arabidopsis thaliana
tgtgattcaggatgtgt

SEQ ID NO: 158416 - DNA, 17 bp, Arabidopsis thaliana
tgtgattcgctaacatc

SEQ ID NO: 158417 - DNA, 17 bp, Arabidopsis thaliana
tgtgattctctgtgtaa

SEQ ID NO: 158418 - DNA, 17 bp, Arabidopsis thaliana
tgtgattctgcccaaat

SEQ ID NO: 158419 - DNA, 17 bp, Arabidopsis thaliana
tgtgattgagtgcttgg

SEQ ID NO: 158420 - DNA, 17 bp, Arabidopsis thaliana
tgtgattgcagattcgc

SEQ ID NO: 158421 - DNA, 17 bp, Arabidopsis thaliana
tgtgattgctcccagac

SEQ ID NO: 158422 - DNA, 17 bp, Arabidopsis thaliana
tgtgattgctcccagcc

SEQ ID NO: 158423 - DNA, 17 bp, Arabidopsis thaliana
tgtgattgctcccaggc

SEQ ID NO: 158424 - DNA, 17 bp, Arabidopsis thaliana
tgtgattggatttgtcc

SEQ ID NO: 158425 - DNA, 17 bp, Arabidopsis thaliana
tgtgattgggctgactg

SEQ ID NO: 158426 - DNA, 17 bp, Arabidopsis thaliana
tgtgattggttcatctg

SEQ ID NO: 158427 - DNA, 17 bp, Arabidopsis thaliana
tgtgattgtgcgacgcg

SEQ ID NO: 158428 - DNA, 17 bp, Arabidopsis thaliana
tgtgattgttggcctga

SEQ ID NO: 158429 - DNA, 17 bp, Arabidopsis thaliana
tgtgatttacccaacta

SEQ ID NO: 158430 - DNA, 17 bp, Arabidopsis thaliana
tgtgatttccgcaggtg

SEQ ID NO: 158431 - DNA, 17 bp, Arabidopsis thaliana
tgtgatttcgatttagg

SEQ ID NO: 158432 - DNA, 17 bp, Arabidopsis thaliana
tgtgatttctgcccact

SEQ ID NO: 158433 - DNA, 17 bp, Arabidopsis thaliana
tgtgatttctgcccagt

SEQ ID NO: 158434 - DNA, 17 bp, Arabidopsis thaliana
tgtgatttggagatgga

SEQ ID NO: 158435 - DNA, 17 bp, Arabidopsis thaliana
tgtgatttgggctatat

SEQ ID NO: 158436 - DNA, 17 bp, Arabidopsis thaliana
tgtgattttgatttagg

SEQ ID NO: 158437 - DNA, 17 bp, Arabidopsis thaliana
tgtgatttttgtttcca

SEQ ID NO: 158438 - DNA, 17 bp, Arabidopsis thaliana
tgtgcaaaggtccatgg

SEQ ID NO: 158439 - DNA, 17 bp, Arabidopsis thaliana
tgtgcaaaggtccattg

SEQ ID NO: 158440 - DNA, 17 bp, Arabidopsis thaliana
tgtgcaaatgccttcta

SEQ ID NO: 158441 - DNA, 17 bp, Arabidopsis thaliana
tgtgcaaatgctgctct

SEQ ID NO: 158442 - DNA, 17 bp, Arabidopsis thaliana
tgtgcaaatgctttcta

SEQ ID NO: 158443 - DNA, 17 bp, Arabidopsis thaliana
tgtgcaacgtttggtgg

SEQ ID NO: 158444 - DNA, 17 bp, Arabidopsis thaliana
tgtgcaactacttgcag

SEQ ID NO: 158445 - DNA, 17 bp, Arabidopsis thaliana
tgtgcaacttttttgcg

SEQ ID NO: 158446 - DNA, 17 bp, Arabidopsis thaliana
tgtgcaagagatctcga

SEQ ID NO: 158447 - DNA, 17 bp, Arabidopsis thaliana
tgtgcaagagtttggtt

SEQ ID NO: 158448 - DNA, 17 bp, Arabidopsis thaliana
tgtgcaagtgccgttca

SEQ ID NO: 158449 - DNA, 17 bp, Arabidopsis thaliana
tgtgcaagttggccgag

SEQ ID NO: 158450 - DNA, 17 bp, Arabidopsis thaliana
tgtgcacaaggctttgc

SEQ ID NO: 158451 - DNA, 17 bp, Arabidopsis thaliana
tgtgcacatgcgccttc

SEQ ID NO: 158452 - DNA, 17 bp, Arabidopsis thaliana
tgtgcacctacttgacc

SEQ ID NO: 158453 - DNA, 17 bp, Arabidopsis thaliana
tgtgcacgtctgcctgg

SEQ ID NO: 158454 - DNA, 17 bp, Arabidopsis thaliana
tgtgcacgtgtcgttgg

SEQ ID NO: 158455 - DNA, 17 bp, Arabidopsis thaliana
tgtgcactggcgttatg

SEQ ID NO: 158456 - DNA, 17 bp, Arabidopsis thaliana
tgtgcacttggtggtgt

SEQ ID NO: 158457 - DNA, 17 bp, Arabidopsis thaliana
tgtgcagagatgttcac

SEQ ID NO: 158458 - DNA, 17 bp, Arabidopsis thaliana
tgtgcaggagatctaca

SEQ ID NO: 158459 - DNA, 17 bp, Arabidopsis thaliana
tgtgcaggagatttcca

SEQ ID NO: 158460 - DNA, 17 bp, Arabidopsis thaliana
tgtgcaggattagatag

SEQ ID NO: 158461 - DNA, 17 bp, Arabidopsis thaliana
tgtgcaggccaaaagta

SEQ ID NO: 158462 - DNA, 17 bp, Arabidopsis thaliana
tgtgcagtatcattcgg

SEQ ID NO: 158463 - DNA, 17 bp, Arabidopsis thaliana
tgtgcagtctgctacaa

SEQ ID NO: 158464 - DNA, 17 bp, Arabidopsis thaliana
tgtgcagtgtgctcctt

SEQ ID NO: 158465 - DNA, 17 bp, Arabidopsis thaliana
tgtgcatatgccacaat

SEQ ID NO: 158466 - DNA, 17 bp, Arabidopsis thaliana
tgtgcatgagatctaca

SEQ ID NO: 158467 - DNA, 17 bp, Arabidopsis thaliana
tgtgcattggtcggctt

SEQ ID NO: 158468 - DNA, 17 bp, Arabidopsis thaliana
tgtgccaagccactatc

SEQ ID NO: 158469 - DNA, 17 bp, Arabidopsis thaliana
tgtgccacagtatcgac

SEQ ID NO: 158470 - DNA, 17 bp, Arabidopsis thaliana
tgtgccacgagaccgga

SEQ ID NO: 158471 - DNA, 17 bp, Arabidopsis thaliana
tgtgccacgtgtcaagt

SEQ ID NO: 158472 - DNA, 17 bp, Arabidopsis thaliana
tgtgccagattttccag

SEQ ID NO: 158473 - DNA, 17 bp, Arabidopsis thaliana
tgtgccagcagccgcgg

SEQ ID NO: 158474 - DNA, 17 bp, Arabidopsis thaliana
tgtgccagctgaagacg

SEQ ID NO: 158475 - DNA, 17 bp, Arabidopsis thaliana
tgtgccaggatgtattg

SEQ ID NO: 158476 - DNA, 17 bp, Arabidopsis thaliana
tgtgccataagttattc

SEQ ID NO: 158477 - DNA, 17 bp, Arabidopsis thaliana
tgtgccatctacgccgg

SEQ ID NO: 158478 - DNA, 17 bp, Arabidopsis thaliana
tgtgccatttcgggtat

SEQ ID NO: 158479 - DNA, 17 bp, Arabidopsis thaliana
tgtgcccaaaataggaa

SEQ ID NO: 158480 - DNA, 17 bp, Arabidopsis thaliana
tgtgcccaaaatttcaa

SEQ ID NO: 158481 - DNA, 17 bp, Arabidopsis thaliana
tgtgcccaactgcgcgc

SEQ ID NO: 158482 - DNA, 17 bp, Arabidopsis thaliana
tgtgcccgatggcgaat

SEQ ID NO: 158483 - DNA, 17 bp, Arabidopsis thaliana
tgtgcccggtgcttgtc

SEQ ID NO: 158484 - DNA, 17 bp, Arabidopsis thaliana
tgtgccctgcaagtgtg

SEQ ID NO: 158485 - DNA, 17 bp, Arabidopsis thaliana
tgtgccgaggatagact

SEQ ID NO: 158486 - DNA, 17 bp, Arabidopsis thaliana
tgtgccgtggagacctg

SEQ ID NO: 158487 - DNA, 17 bp, Arabidopsis thaliana
tgtgcctatcggttgtt

SEQ ID NO: 158488 - DNA, 17 bp, Arabidopsis thaliana
tgtgcctccacgtgtac

SEQ ID NO: 158489 - DNA, 17 bp, Arabidopsis thaliana
tgtgcctctgatgttcg

SEQ ID NO: 158490 - DNA, 17 bp, Arabidopsis thaliana
tgtgcctctgggagatg

SEQ ID NO: 158491 - DNA, 17 bp, Arabidopsis thaliana
tgtgcctgaacttccag

SEQ ID NO: 158492 - DNA, 17 bp, Arabidopsis thaliana
tgtgcctgaagtgccaa

SEQ ID NO: 158493 - DNA, 17 bp, Arabidopsis thaliana
tgtgcctgtgccacctg

SEQ ID NO: 158494 - DNA, 17 bp, Arabidopsis thaliana
tgtgcctgtgcttgcgt

SEQ ID NO: 158495 - DNA, 17 bp, Arabidopsis thaliana
tgtgccttggagcaagt

SEQ ID NO: 158496 - DNA, 17 bp, Arabidopsis thaliana
tgtgccttgtacgtgag

SEQ ID NO: 158497 - DNA, 17 bp, Arabidopsis thaliana
tgtgcgaatcaacggtt

SEQ ID NO: 158498 - DNA, 17 bp, Arabidopsis thaliana
tgtgcgaatttcagatc

SEQ ID NO: 158499 - DNA, 17 bp, Arabidopsis thaliana
tgtgcgacagctgaacg

SEQ ID NO: 158500 - DNA, 17 bp, Arabidopsis thaliana
tgtgcgacattcgctca

SEQ ID NO: 158501 - DNA, 17 bp, Arabidopsis thaliana
tgtgcgaccgaataggg

SEQ ID NO: 158502 - DNA, 17 bp, Arabidopsis thaliana
tgtgcgacgagaggcag

SEQ ID NO: 158503 - DNA, 17 bp, Arabidopsis thaliana
tgtgcgactatgagaac

SEQ ID NO: 158504 - DNA, 17 bp, Arabidopsis thaliana
tgtgcgagtcaacgggt

SEQ ID NO: 158505 - DNA, 17 bp, Arabidopsis thaliana
tgtgcgagttctggtcg

SEQ ID NO: 158506 - DNA, 17 bp, Arabidopsis thaliana
tgtgcgagtttagcctt

SEQ ID NO: 158507 - DNA, 17 bp, Arabidopsis thaliana
tgtgcgatcgacccgtg

SEQ ID NO: 158508 - DNA, 17 bp, Arabidopsis thaliana
tgtgcgatctcggagcc

SEQ ID NO: 158509 - DNA, 17 bp, Arabidopsis thaliana
tgtgcgatgatatgtag

SEQ ID NO: 158510 - DNA, 17 bp, Arabidopsis thaliana
tgtgcgatgatgtgaca

SEQ ID NO: 158511 - DNA, 17 bp, Arabidopsis thaliana
tgtgcgattcagcaagg

SEQ ID NO: 158512 - DNA, 17 bp, Arabidopsis thaliana
tgtgcgccttgttttct

SEQ ID NO: 158513 - DNA, 17 bp, Arabidopsis thaliana
tgtgcgcgacttatatg

SEQ ID NO: 158514 - DNA, 17 bp, Arabidopsis thaliana
tgtgcgcttgggagtcc

SEQ ID NO: 158515 - DNA, 17 bp, Arabidopsis thaliana
tgtgcgctttgtcttgt

SEQ ID NO: 158516 - DNA, 17 bp, Arabidopsis thaliana
tgtgcggattgttacaa

SEQ ID NO: 158517 - DNA, 17 bp, Arabidopsis thaliana
tgtgcggatttgatgag

SEQ ID NO: 158518 - DNA, 17 bp, Arabidopsis thaliana
tgtgcggccgattcact

SEQ ID NO: 158519 - DNA, 17 bp, Arabidopsis thaliana
tgtgcgggagaagtgcg

SEQ ID NO: 158520 - DNA, 17 bp, Arabidopsis thaliana
tgtgcgggtcaagatct

SEQ ID NO: 158521 - DNA, 17 bp, Arabidopsis thaliana
tgtgcgggtcaagatgt

SEQ ID NO: 158522 - DNA, 17 bp, Arabidopsis thaliana
tgtgcggtccgactcgc

SEQ ID NO: 158523 - DNA, 17 bp, Arabidopsis thaliana
tgtgcggttcacaacat

SEQ ID NO: 158524 - DNA, 17 bp, Arabidopsis thaliana
tgtgcggtttggttgat

SEQ ID NO: 158525 - DNA, 17 bp, Arabidopsis thaliana
tgtgcgtatcgacccac

SEQ ID NO: 158526 - DNA, 17 bp, Arabidopsis thaliana
tgtgcgtatcgacccat

SEQ ID NO: 158527 - DNA, 17 bp, Arabidopsis thaliana
tgtgcgtatcgacccgt

SEQ ID NO: 158528 - DNA, 17 bp, Arabidopsis thaliana
tgtgcgtgctcacctct

SEQ ID NO: 158529 - DNA, 17 bp, Arabidopsis thaliana
tgtgcgttctattattg

SEQ ID NO: 158530 - DNA, 17 bp, Arabidopsis thaliana
tgtgcgttctcgaagcg

SEQ ID NO: 158531 - DNA, 17 bp, Arabidopsis thaliana
tgtgctaagaagcatgg

SEQ ID NO: 158532 - DNA, 17 bp, Arabidopsis thaliana
tgtgctaccggaggctc

SEQ ID NO: 158533 - DNA, 17 bp, Arabidopsis thaliana
tgtgctacgggaggctc

SEQ ID NO: 158534 - DNA, 17 bp, Arabidopsis thaliana
tgtgctactgtctggac

SEQ ID NO: 158535 - DNA, 17 bp, Arabidopsis thaliana
tgtgctactgtctgtac

SEQ ID NO: 158536 - DNA, 17 bp, Arabidopsis thaliana
tgtgctagctctgaatt

SEQ ID NO: 158537 - DNA, 17 bp, Arabidopsis thaliana
tgtgctaggttttcaac

SEQ ID NO: 158538 - DNA, 17 bp, Arabidopsis thaliana
tgtgctagtgcaccggg

SEQ ID NO: 158539 - DNA, 17 bp, Arabidopsis thaliana
tgtgctagtgcatcggg

SEQ ID NO: 158540 - DNA, 17 bp, Arabidopsis thaliana
tgtgctatatgacggac

SEQ ID NO: 158541 - DNA, 17 bp, Arabidopsis thaliana
tgtgctatatgcggacc

SEQ ID NO: 158542 - DNA, 17 bp, Arabidopsis thaliana
tgtgctatgactttttg

SEQ ID NO: 158543 - DNA, 17 bp, Arabidopsis thaliana
tgtgctatggcttctca

SEQ ID NO: 158544 - DNA, 17 bp, Arabidopsis thaliana
tgtgctatggctttctt

SEQ ID NO: 158545 - DNA, 17 bp, Arabidopsis thaliana
tgtgctcaaagtccagt

SEQ ID NO: 158546 - DNA, 17 bp, Arabidopsis thaliana
tgtgctcacggccggct

SEQ ID NO: 158547 - DNA, 17 bp, Arabidopsis thaliana
tgtgctcagggccagtc

SEQ ID NO: 158548 - DNA, 17 bp, Arabidopsis thaliana
tgtgctccgtcttctcc

SEQ ID NO: 158549 - DNA, 17 bp, Arabidopsis thaliana
tgtgctccttgtttgcc

SEQ ID NO: 158550 - DNA, 17 bp, Arabidopsis thaliana
tgtgctctctagccttc

SEQ ID NO: 158551 - DNA, 17 bp, Arabidopsis thaliana
tgtgctctgctaccata

SEQ ID NO: 158552 - DNA, 17 bp, Arabidopsis thaliana
tgtgctctgcttcttga

SEQ ID NO: 158553 - DNA, 17 bp, Arabidopsis thaliana
tgtgctcttgaacttga

SEQ ID NO: 158554 - DNA, 17 bp, Arabidopsis thaliana
tgtgctgaaacaaagac

SEQ ID NO: 158555 - DNA, 17 bp, Arabidopsis thaliana
tgtgctgaacttggatt

SEQ ID NO: 158556 - DNA, 17 bp, Arabidopsis thaliana
tgtgctgagcgttgaaa

SEQ ID NO: 158557 - DNA, 17 bp, Arabidopsis thaliana
tgtgctgatgtgtcaac

SEQ ID NO: 158558 - DNA, 17 bp, Arabidopsis thaliana
tgtgctgatgtgtcaag

SEQ ID NO: 158559 - DNA, 17 bp, Arabidopsis thaliana
tgtgctgctcagatatc

SEQ ID NO: 158560 - DNA, 17 bp, Arabidopsis thaliana
tgtgctgcttcgctaga

SEQ ID NO: 158561 - DNA, 17 bp, Arabidopsis thaliana
tgtgctggacgtggccg

SEQ ID NO: 158562 - DNA, 17 bp, Arabidopsis thaliana
tgtgctggaggagtgac

SEQ ID NO: 158563 - DNA, 17 bp, Arabidopsis thaliana
tgtgctggaggagtgat

SEQ ID NO: 158564 - DNA, 17 bp, Arabidopsis thaliana
tgtgctggcgacgcatc

SEQ ID NO: 158565 - DNA, 17 bp, Arabidopsis thaliana
tgtgctgttcgtttgac

SEQ ID NO: 158566 - DNA, 17 bp, Arabidopsis thaliana
tgtgcttaacgaggtaa

SEQ ID NO: 158567 - DNA, 17 bp, Arabidopsis thaliana
tgtgcttagcctgtacg

SEQ ID NO: 158568 - DNA, 17 bp, Arabidopsis thaliana
tgtgcttagttgcttca

SEQ ID NO: 158569 - DNA, 17 bp, Arabidopsis thaliana
tgtgcttattgacggtc

SEQ ID NO: 158570 - DNA, 17 bp, Arabidopsis thaliana
tgtgcttcacggccaat

SEQ ID NO: 158571 - DNA, 17 bp, Arabidopsis thaliana
tgtgcttcactccgtgc

SEQ ID NO: 158572 - DNA, 17 bp, Arabidopsis thaliana
tgtgcttcatttgcgct

SEQ ID NO: 158573 - DNA, 17 bp, Arabidopsis thaliana
tgtgcttctttgcttat

SEQ ID NO: 158574 - DNA, 17 bp, Arabidopsis thaliana
tgtgcttgaaacttgga

SEQ ID NO: 158575 - DNA, 17 bp, Arabidopsis thaliana
tgtgcttgcagagagaa

SEQ ID NO: 158576 - DNA, 17 bp, Arabidopsis thaliana
tgtgcttgccccgcgat

SEQ ID NO: 158577 - DNA, 17 bp, Arabidopsis thaliana
tgtgcttgtcgcagcga

SEQ ID NO: 158578 - DNA, 17 bp, Arabidopsis thaliana
tgtgcttgtgaagacga

SEQ ID NO: 158579 - DNA, 17 bp, Arabidopsis thaliana
tgtgctttgttctatcg

SEQ ID NO: 158580 - DNA, 17 bp, Arabidopsis thaliana
tgtggaagacgatcaga

SEQ ID NO: 158581 - DNA, 17 bp, Arabidopsis thaliana
tgtggaagagtcccgga

SEQ ID NO: 158582 - DNA, 17 bp, Arabidopsis thaliana
tgtggaagcaaacacgt

SEQ ID NO: 158583 - DNA, 17 bp, Arabidopsis thaliana
tgtggaagttgcgttgg

SEQ ID NO: 158584 - DNA, 17 bp, Arabidopsis thaliana
tgtggaagttgctgttg

SEQ ID NO: 158585 - DNA, 17 bp, Arabidopsis thaliana
tgtggaatagtgtgact

SEQ ID NO: 158586 - DNA, 17 bp, Arabidopsis thaliana
tgtggaatccttagtct

SEQ ID NO: 158587 - DNA, 17 bp, Arabidopsis thaliana
tgtggaatcgcgtctct

SEQ ID NO: 158588 - DNA, 17 bp, Arabidopsis thaliana
tgtggaatcgctaatga

SEQ ID NO: 158589 - DNA, 17 bp, Arabidopsis thaliana
tgtggaatctcgatggg

SEQ ID NO: 158590 - DNA, 17 bp, Arabidopsis thaliana
tgtggaattggactcgt

SEQ ID NO: 158591 - DNA, 17 bp, Arabidopsis thaliana
tgtggacacgatcgatg

SEQ ID NO: 158592 - DNA, 17 bp, Arabidopsis thaliana
tgtggacaggtttggca

SEQ ID NO: 158593 - DNA, 17 bp, Arabidopsis thaliana
tgtggacatccgttcct

SEQ ID NO: 158594 - DNA, 17 bp, Arabidopsis thaliana
tgtggaccctgtctctc

SEQ ID NO: 158595 - DNA, 17 bp, Arabidopsis thaliana
tgtggaccgacgcggat

SEQ ID NO: 158596 - DNA, 17 bp, Arabidopsis thaliana
tgtggaccgatgggctt

SEQ ID NO: 158597 - DNA, 17 bp, Arabidopsis thaliana
tgtggacgattgtaatt

SEQ ID NO: 158598 - DNA, 17 bp, Arabidopsis thaliana
tgtggacgccggcgacg

SEQ ID NO: 158599 - DNA, 17 bp, Arabidopsis thaliana
tgtggacgggtttggca

SEQ ID NO: 158600 - DNA, 17 bp, Arabidopsis thaliana
tgtggacggtagcggtt

SEQ ID NO: 158601 - DNA, 17 bp, Arabidopsis thaliana
tgtggacgtctgttgcg

SEQ ID NO: 158602 - DNA, 17 bp, Arabidopsis thaliana
tgtggactatgaatggg

SEQ ID NO: 158603 - DNA, 17 bp, Arabidopsis thaliana
tgtggacttaggctttc

SEQ ID NO: 158604 - DNA, 17 bp, Arabidopsis thaliana
tgtggacttctgtaatc

SEQ ID NO: 158605 - DNA, 17 bp, Arabidopsis thaliana
tgtggacttgtggtgca

SEQ ID NO: 158606 - DNA, 17 bp, Arabidopsis thaliana
tgtggagaagagatccc

SEQ ID NO: 158607 - DNA, 17 bp, Arabidopsis thaliana
tgtggagacgtcgcccc

SEQ ID NO: 158608 - DNA, 17 bp, Arabidopsis thaliana
tgtggagacgtcgctcc

SEQ ID NO: 158609 - DNA, 17 bp, Arabidopsis thaliana
tgtggagacgtcgctgc

SEQ ID NO: 158610 - DNA, 17 bp, Arabidopsis thaliana
tgtggagacgtcgtcgc

SEQ ID NO: 158611 - DNA, 17 bp, Arabidopsis thaliana
tgtggagagccagatgt

SEQ ID NO: 158612 - DNA, 17 bp, Arabidopsis thaliana
tgtggagccattccacg

SEQ ID NO: 158613 - DNA, 17 bp, Arabidopsis thaliana
tgtggagctatgtgact

SEQ ID NO: 158614 - DNA, 17 bp, Arabidopsis thaliana
tgtggagctttcccata

SEQ ID NO: 158615 - DNA, 17 bp, Arabidopsis thaliana
tgtggagttctctcagg

SEQ ID NO: 158616 - DNA, 17 bp, Arabidopsis thaliana
tgtggataccgaggccc

SEQ ID NO: 158617 - DNA, 17 bp, Arabidopsis thaliana
tgtggataccgaggcct

SEQ ID NO: 158618 - DNA, 17 bp, Arabidopsis thaliana
tgtggatacttatctta

SEQ ID NO: 158619 - DNA, 17 bp, Arabidopsis thaliana
tgtggatcctcgtgtcg

SEQ ID NO: 158620 - DNA, 17 bp, Arabidopsis thaliana
tgtggatcctgtctctc

SEQ ID NO: 158621 - DNA, 17 bp, Arabidopsis thaliana
tgtggatctaaagaaaa

SEQ ID NO: 158622 - DNA, 17 bp, Arabidopsis thaliana
tgtggatcttggagcaa

SEQ ID NO: 158623 - DNA, 17 bp, Arabidopsis thaliana
tgtggatcttgtctctc

SEQ ID NO: 158624 - DNA, 17 bp, Arabidopsis thaliana
tgtggatgaagctgagt

SEQ ID NO: 158625 - DNA, 17 bp, Arabidopsis thaliana
tgtggatgaggactgct

SEQ ID NO: 158626 - DNA, 17 bp, Arabidopsis thaliana
tgtggatgcttttgctt

SEQ ID NO: 158627 - DNA, 17 bp, Arabidopsis thaliana
tgtggatgtgcttgatt

SEQ ID NO: 158628 - DNA, 17 bp, Arabidopsis thaliana
tgtggatgttggccggt

SEQ ID NO: 158629 - DNA, 17 bp, Arabidopsis thaliana
tgtggattcccgagcct

SEQ ID NO: 158630 - DNA, 17 bp, Arabidopsis thaliana
tgtggattgtcaagacc

SEQ ID NO: 158631 - DNA, 17 bp, Arabidopsis thaliana
tgtggattttggcatga

SEQ ID NO: 158632 - DNA, 17 bp, Arabidopsis thaliana
tgtggattttttcgttg

SEQ ID NO: 158633 - DNA, 17 bp, Arabidopsis thaliana
tgtggcaaatttcttac

SEQ ID NO: 158634 - DNA, 17 bp, Arabidopsis thaliana
tgtggcaacgggtggtc

SEQ ID NO: 158635 - DNA, 17 bp, Arabidopsis thaliana
tgtggcaccaccgcacc

SEQ ID NO: 158636 - DNA, 17 bp, Arabidopsis thaliana
tgtggcactcactggtg

SEQ ID NO: 158637 - DNA, 17 bp, Arabidopsis thaliana
tgtggcactttgaacct

SEQ ID NO: 158638 - DNA, 17 bp, Arabidopsis thaliana
tgtggcagactcttcca

SEQ ID NO: 158639 - DNA, 17 bp, Arabidopsis thaliana
tgtggcagccaagcgtt

SEQ ID NO: 158640 - DNA, 17 bp, Arabidopsis thaliana
tgtggcagtggacttca

SEQ ID NO: 158641 - DNA, 17 bp, Arabidopsis thaliana
tgtggcatgaattgtaa

SEQ ID NO: 158642 - DNA, 17 bp, Arabidopsis thaliana
tgtggcattgttccggg

SEQ ID NO: 158643 - DNA, 17 bp, Arabidopsis thaliana
tgtggccctgcaaatcg

SEQ ID NO: 158644 - DNA, 17 bp, Arabidopsis thaliana
tgtggccctgcaggaat

SEQ ID NO: 158645 - DNA, 17 bp, Arabidopsis thaliana
tgtggccgcatgagagt

SEQ ID NO: 158646 - DNA, 17 bp, Arabidopsis thaliana
tgtggccgtagaaacag

SEQ ID NO: 158647 - DNA, 17 bp, Arabidopsis thaliana
tgtggccgtagaagcag

SEQ ID NO: 158648 - DNA, 17 bp, Arabidopsis thaliana
tgtggccgtcaatcacc

SEQ ID NO: 158649 - DNA, 17 bp, Arabidopsis thaliana
tgtggccgtggggaccc

SEQ ID NO: 158650 - DNA, 17 bp, Arabidopsis thaliana
tgtggcgaagatcttgc

SEQ ID NO: 158651 - DNA, 17 bp, Arabidopsis thaliana
tgtggcgagacggattt

SEQ ID NO: 158652 - DNA, 17 bp, Arabidopsis thaliana
tgtggcggaaattgtgt

SEQ ID NO: 158653 - DNA, 17 bp, Arabidopsis thaliana
tgtggcggccaagcgtt

SEQ ID NO: 158654 - DNA, 17 bp, Arabidopsis thaliana
tgtggcgggcgcctcag

SEQ ID NO: 158655 - DNA, 17 bp, Arabidopsis thaliana
tgtggcgtactgtgaca

SEQ ID NO: 158656 - DNA, 17 bp, Arabidopsis thaliana
tgtggcgtttttcacag

SEQ ID NO: 158657 - DNA, 17 bp, Arabidopsis thaliana
tgtggctaaagtccaaa

SEQ ID NO: 158658 - DNA, 17 bp, Arabidopsis thaliana
tgtggctaataaagctc

SEQ ID NO: 158659 - DNA, 17 bp, Arabidopsis thaliana
tgtggctatccaccgtg

SEQ ID NO: 158660 - DNA, 17 bp, Arabidopsis thaliana
tgtggctctatgagaat

SEQ ID NO: 158661 - DNA, 17 bp, Arabidopsis thaliana
tgtggctctgtctctgt

SEQ ID NO: 158662 - DNA, 17 bp, Arabidopsis thaliana
tgtggctcttgttgcga

SEQ ID NO: 158663 - DNA, 17 bp, Arabidopsis thaliana
tgtggctgaagcttatg

SEQ ID NO: 158664 - DNA, 17 bp, Arabidopsis thaliana
tgtggctgaggatgaaa

SEQ ID NO: 158665 - DNA, 17 bp, Arabidopsis thaliana
tgtggctgattcacttg

SEQ ID NO: 158666 - DNA, 17 bp, Arabidopsis thaliana
tgtggctgtcgtcatct

SEQ ID NO: 158667 - DNA, 17 bp, Arabidopsis thaliana
tgtggcttactatctca

SEQ ID NO: 158668 - DNA, 17 bp, Arabidopsis thaliana
tgtggctttcttttgcg

SEQ ID NO: 158669 - DNA, 17 bp, Arabidopsis thaliana
tgtggctttgttgttcc

SEQ ID NO: 158670 - DNA, 17 bp, Arabidopsis thaliana
tgtgggaatttgtctgt

SEQ ID NO: 158671 - DNA, 17 bp, Arabidopsis thaliana
tgtgggacctttggttt

SEQ ID NO: 158672 - DNA, 17 bp, Arabidopsis thaliana
tgtgggactcattgcct

SEQ ID NO: 158673 - DNA, 17 bp, Arabidopsis thaliana
tgtgggactgcgatggt

SEQ ID NO: 158674 - DNA, 17 bp, Arabidopsis thaliana
tgtgggagagagttgag

SEQ ID NO: 158675 - DNA, 17 bp, Arabidopsis thaliana
tgtgggagtgggacatt

SEQ ID NO: 158676 - DNA, 17 bp, Arabidopsis thaliana
tgtgggagtgttttgac

SEQ ID NO: 158677 - DNA, 17 bp, Arabidopsis thaliana
tgtgggcaagcgtgaaa

SEQ ID NO: 158678 - DNA, 17 bp, Arabidopsis thaliana
tgtgggccactataggg

SEQ ID NO: 158679 - DNA, 17 bp, Arabidopsis thaliana
tgtgggccccagacaaa

SEQ ID NO: 158680 - DNA, 17 bp, Arabidopsis thaliana
tgtgggcctacaagaca

SEQ ID NO: 158681 - DNA, 17 bp, Arabidopsis thaliana
tgtgggcctcccattcg

SEQ ID NO: 158682 - DNA, 17 bp, Arabidopsis thaliana
tgtgggctccattcgac

SEQ ID NO: 158683 - DNA, 17 bp, Arabidopsis thaliana
tgtgggctccccatccg

SEQ ID NO: 158684 - DNA, 17 bp, Arabidopsis thaliana
tgtgggctccccattcg

SEQ ID NO: 158685 - DNA, 17 bp, Arabidopsis thaliana
tgtgggctgctctgtgt

SEQ ID NO: 158686 - DNA, 17 bp, Arabidopsis thaliana
tgtgggctgttgttctg

SEQ ID NO: 158687 - DNA, 17 bp, Arabidopsis thaliana
tgtgggctttaccctgt

SEQ ID NO: 158688 - DNA, 17 bp, Arabidopsis thaliana
tgtgggctttgcccgcg

SEQ ID NO: 158689 - DNA, 17 bp, Arabidopsis thaliana
tgtgggggtcccactgg

SEQ ID NO: 158690 - DNA, 17 bp, Arabidopsis thaliana
tgtggggtttggttgat

SEQ ID NO: 158691 - DNA, 17 bp, Arabidopsis thaliana
tgtgggtcattgtgcgg

SEQ ID NO: 158692 - DNA, 17 bp, Arabidopsis thaliana
tgtgggtccatgcaaaa

SEQ ID NO: 158693 - DNA, 17 bp, Arabidopsis thaliana
tgtgggtcgttctgccg

SEQ ID NO: 158694 - DNA, 17 bp, Arabidopsis thaliana
tgtgggtcttctcaggt

SEQ ID NO: 158695 - DNA, 17 bp, Arabidopsis thaliana
tgtgggtgattggttcg

SEQ ID NO: 158696 - DNA, 17 bp, Arabidopsis thaliana
tgtgggtgcttcgccgt

SEQ ID NO: 158697 - DNA, 17 bp, Arabidopsis thaliana
tgtgggtgggaaacggt

SEQ ID NO: 158698 - DNA, 17 bp, Arabidopsis thaliana
tgtgggtggtggtgcat

SEQ ID NO: 158699 - DNA, 17 bp, Arabidopsis thaliana
tgtgggtgtcccaccgg

SEQ ID NO: 158700 - DNA, 17 bp, Arabidopsis thaliana
tgtgggttccgcctctg

SEQ ID NO: 158701 - DNA, 17 bp, Arabidopsis thaliana
tgtgggttcgagtccca

SEQ ID NO: 158702 - DNA, 17 bp, Arabidopsis thaliana
tgtgggttcggctccca

SEQ ID NO: 158703 - DNA, 17 bp, Arabidopsis thaliana
tgtgggttcgggtccca

SEQ ID NO: 158704 - DNA, 17 bp, Arabidopsis thaliana
tgtgggttcgtcccact

SEQ ID NO: 158705 - DNA, 17 bp, Arabidopsis thaliana
tgtgggttcgtgtccca

SEQ ID NO: 158706 - DNA, 17 bp, Arabidopsis thaliana
tgtgggttcgtgtctga

SEQ ID NO: 158707 - DNA, 17 bp, Arabidopsis thaliana
tgtgggttggttgtcgg

SEQ ID NO: 158708 - DNA, 17 bp, Arabidopsis thaliana
tgtgggtttctcatgga

SEQ ID NO: 158709 - DNA, 17 bp, Arabidopsis thaliana
tgtggtaccagtgcagg

SEQ ID NO: 158710 - DNA, 17 bp, Arabidopsis thaliana
tgtggtacggttcaact

SEQ ID NO: 158711 - DNA, 17 bp, Arabidopsis thaliana
tgtggtactcactggtg

SEQ ID NO: 158712 - DNA, 17 bp, Arabidopsis thaliana
tgtggtagcggttgtta

SEQ ID NO: 158713 - DNA, 17 bp, Arabidopsis thaliana
tgtggtaggctaacttg

SEQ ID NO: 158714 - DNA, 17 bp, Arabidopsis thaliana
tgtggtcaaggccagcc

SEQ ID NO: 158715 - DNA, 17 bp, Arabidopsis thaliana
tgtggtcagatagctcc

SEQ ID NO: 158716 - DNA, 17 bp, Arabidopsis thaliana
tgtggtcagatccgtca

SEQ ID NO: 158717 - DNA, 17 bp, Arabidopsis thaliana
tgtggtcatttccggca

SEQ ID NO: 158718 - DNA, 17 bp, Arabidopsis thaliana
tgtggtcgcaaccgtaa

SEQ ID NO: 158719 - DNA, 17 bp, Arabidopsis thaliana
tgtggtcgtgggttcgg

SEQ ID NO: 158720 - DNA, 17 bp, Arabidopsis thaliana
tgtggtctcttagattt

SEQ ID NO: 158721 - DNA, 17 bp, Arabidopsis thaliana
tgtggtcttccttgttt

SEQ ID NO: 158722 - DNA, 17 bp, Arabidopsis thaliana
tgtggtgacttggctca

SEQ ID NO: 158723 - DNA, 17 bp, Arabidopsis thaliana
tgtggtgagcctgtaac

SEQ ID NO: 158724 - DNA, 17 bp, Arabidopsis thaliana
tgtggtgatttgtagga

SEQ ID NO: 158725 - DNA, 17 bp, Arabidopsis thaliana
tgtggtgccgttttggg

SEQ ID NO: 158726 - DNA, 17 bp, Arabidopsis thaliana
tgtggtggtccatttct

SEQ ID NO: 158727 - DNA, 17 bp, Arabidopsis thaliana
tgtggtggtgatgagat

SEQ ID NO: 158728 - DNA, 17 bp, Arabidopsis thaliana
tgtggtggtggtggtgg

SEQ ID NO: 158729 - DNA, 17 bp, Arabidopsis thaliana
tgtggtggttgtggctc

SEQ ID NO: 158730 - DNA, 17 bp, Arabidopsis thaliana
tgtggtgttttctcttt

SEQ ID NO: 158731 - DNA, 17 bp, Arabidopsis thaliana
tgtggttaaatagcctg

SEQ ID NO: 158732 - DNA, 17 bp, Arabidopsis thaliana
tgtggttaaggtgacaa

SEQ ID NO: 158733 - DNA, 17 bp, Arabidopsis thaliana
tgtggttacctctcggc

SEQ ID NO: 158734 - DNA, 17 bp, Arabidopsis thaliana
tgtggttaggacattgc

SEQ ID NO: 158735 - DNA, 17 bp, Arabidopsis thaliana
tgtggttccaagtgtgg

SEQ ID NO: 158736 - DNA, 17 bp, Arabidopsis thaliana
tgtggttcgacccttgc

SEQ ID NO: 158737 - DNA, 17 bp, Arabidopsis thaliana
tgtggttcgcatcgaga

SEQ ID NO: 158738 - DNA, 17 bp, Arabidopsis thaliana
tgtggttcgttgcggtt

SEQ ID NO: 158739 - DNA, 17 bp, Arabidopsis thaliana
tgtggttctgtcttgcc

SEQ ID NO: 158740 - DNA, 17 bp, Arabidopsis thaliana
tgtggttgctagagcga

SEQ ID NO: 158741 - DNA, 17 bp, Arabidopsis thaliana
tgtggttggtcctgggt

SEQ ID NO: 158742 - DNA, 17 bp, Arabidopsis thaliana
tgtggtttacacttagc

SEQ ID NO: 158743 - DNA, 17 bp, Arabidopsis thaliana
tgtggtttcggcccaga

SEQ ID NO: 158744 - DNA, 17 bp, Arabidopsis thaliana
tgtggtttcgggcttca

SEQ ID NO: 158745 - DNA, 17 bp, Arabidopsis thaliana
tgtggtttcggttctgg

SEQ ID NO: 158746 - DNA, 17 bp, Arabidopsis thaliana
tgtgtaaaacgccgagc

SEQ ID NO: 158747 - DNA, 17 bp, Arabidopsis thaliana
tgtgtaacaactcacct

SEQ ID NO: 158748 - DNA, 17 bp, Arabidopsis thaliana
tgtgtaagcccaagtga

SEQ ID NO: 158749 - DNA, 17 bp, Arabidopsis thaliana
tgtgtaatcagacagta

SEQ ID NO: 158750 - DNA, 17 bp, Arabidopsis thaliana
tgtgtactacaagttgt

SEQ ID NO: 158751 - DNA, 17 bp, Arabidopsis thaliana
tgtgtactttgaaacaa

SEQ ID NO: 158752 - DNA, 17 bp, Arabidopsis thaliana
tgtgtactttgagacaa

SEQ ID NO: 158753 - DNA, 17 bp, Arabidopsis thaliana
tgtgtagaatgtcgaac

SEQ ID NO: 158754 - DNA, 17 bp, Arabidopsis thaliana
tgtgtagctatagccag

SEQ ID NO: 158755 - DNA, 17 bp, Arabidopsis thaliana
tgtgtaggataggtggg

SEQ ID NO: 158756 - DNA, 17 bp, Arabidopsis thaliana
tgtgtatacttggctta

SEQ ID NO: 158757 - DNA, 17 bp, Arabidopsis thaliana
tgtgtataggccactcg

SEQ ID NO: 158758 - DNA, 17 bp, Arabidopsis thaliana
tgtgtatccattggagg

SEQ ID NO: 158759 - DNA, 17 bp, Arabidopsis thaliana
tgtgtatccccttgtcc

SEQ ID NO: 158760 - DNA, 17 bp, Arabidopsis thaliana
tgtgtatcgactcacca

SEQ ID NO: 158761 - DNA, 17 bp, Arabidopsis thaliana
tgtgtatcgcatggaac

SEQ ID NO: 158762 - DNA, 17 bp, Arabidopsis thaliana
tgtgtatgatcaaagcc

SEQ ID NO: 158763 - DNA, 17 bp, Arabidopsis thaliana
tgtgtatgattggtgcc

SEQ ID NO: 158764 - DNA, 17 bp, Arabidopsis thaliana
tgtgtattacggagagc

SEQ ID NO: 158765 - DNA, 17 bp, Arabidopsis thaliana
tgtgtattattcaggct

SEQ ID NO: 158766 - DNA, 17 bp, Arabidopsis thaliana
tgtgtattgcgattcac

SEQ ID NO: 158767 - DNA, 17 bp, Arabidopsis thaliana
tgtgtcaacatccgatc

SEQ ID NO: 158768 - DNA, 17 bp, Arabidopsis thaliana
tgtgtcaactgctggat

SEQ ID NO: 158769 - DNA, 17 bp, Arabidopsis thaliana
tgtgtcaagttgtggga

SEQ ID NO: 158770 - DNA, 17 bp, Arabidopsis thaliana
tgtgtcacaatccaaag

SEQ ID NO: 158771 - DNA, 17 bp, Arabidopsis thaliana
tgtgtcacgggaaagtg

SEQ ID NO: 158772 - DNA, 17 bp, Arabidopsis thaliana
tgtgtcactttttacac

SEQ ID NO: 158773 - DNA, 17 bp, Arabidopsis thaliana
tgtgtcagactcagtgg

SEQ ID NO: 158774 - DNA, 17 bp, Arabidopsis thaliana
tgtgtcagcacaagcca

SEQ ID NO: 158775 - DNA, 17 bp, Arabidopsis thaliana
tgtgtcagccaaaactt

SEQ ID NO: 158776 - DNA, 17 bp, Arabidopsis thaliana
tgtgtcagccttttact

SEQ ID NO: 158777 - DNA, 17 bp, Arabidopsis thaliana
tgtgtcaggacctacgg

SEQ ID NO: 158778 - DNA, 17 bp, Arabidopsis thaliana
tgtgtcagtatccgcta

SEQ ID NO: 158779 - DNA, 17 bp, Arabidopsis thaliana
tgtgtcatctttaggct

SEQ ID NO: 158780 - DNA, 17 bp, Arabidopsis thaliana
tgtgtcattgtaccctt

SEQ ID NO: 158781 - DNA, 17 bp, Arabidopsis thaliana
tgtgtccatgggtgatt

SEQ ID NO: 158782 - DNA, 17 bp, Arabidopsis thaliana
tgtgtccattggtcggc

SEQ ID NO: 158783 - DNA, 17 bp, Arabidopsis thaliana
tgtgtccatttcatccg

SEQ ID NO: 158784 - DNA, 17 bp, Arabidopsis thaliana
tgtgtccgacttgttga

SEQ ID NO: 158785 - DNA, 17 bp, Arabidopsis thaliana
tgtgtccgagtatctga

SEQ ID NO: 158786 - DNA, 17 bp, Arabidopsis thaliana
tgtgtccgtcgattatt

SEQ ID NO: 158787 - DNA, 17 bp, Arabidopsis thaliana
tgtgtcgacatctcctg

SEQ ID NO: 158788 - DNA, 17 bp, Arabidopsis thaliana
tgtgtcgacctgatgaa

SEQ ID NO: 158789 - DNA, 17 bp, Arabidopsis thaliana
tgtgtcgatgattgatg

SEQ ID NO: 158790 - DNA, 17 bp, Arabidopsis thaliana
tgtgtcgcccaatgtga

SEQ ID NO: 158791 - DNA, 17 bp, Arabidopsis thaliana
tgtgtcgcgaaccaaag

SEQ ID NO: 158792 - DNA, 17 bp, Arabidopsis thaliana
tgtgtcgctccggcggc

SEQ ID NO: 158793 - DNA, 17 bp, Arabidopsis thaliana
tgtgtcggatggtggta

SEQ ID NO: 158794 - DNA, 17 bp, Arabidopsis thaliana
tgtgtcggccaaaactt

SEQ ID NO: 158795 - DNA, 17 bp, Arabidopsis thaliana
tgtgtcgtctgccatgg

SEQ ID NO: 158796 - DNA, 17 bp, Arabidopsis thaliana
tgtgtcgtgtgcggaca

SEQ ID NO: 158797 - DNA, 17 bp, Arabidopsis thaliana
tgtgtcgttccattcga

SEQ ID NO: 158798 - DNA, 17 bp, Arabidopsis thaliana
tgtgtcgttcgtttgac

SEQ ID NO: 158799 - DNA, 17 bp, Arabidopsis thaliana
tgtgtcgtttgtattct

SEQ ID NO: 158800 - DNA, 17 bp, Arabidopsis thaliana
tgtgtctaaatttctgt

SEQ ID NO: 158801 - DNA, 17 bp, Arabidopsis thaliana
tgtgtctaagtgctatt

SEQ ID NO: 158802 - DNA, 17 bp, Arabidopsis thaliana
tgtgtctaatatcgcca

SEQ ID NO: 158803 - DNA, 17 bp, Arabidopsis thaliana
tgtgtctagaaacaggc

SEQ ID NO: 158804 - DNA, 17 bp, Arabidopsis thaliana
tgtgtctatgtgtcact

SEQ ID NO: 158805 - DNA, 17 bp, Arabidopsis thaliana
tgtgtctcaaatgctca

SEQ ID NO: 158806 - DNA, 17 bp, Arabidopsis thaliana
tgtgtctcaccattcat

SEQ ID NO: 158807 - DNA, 17 bp, Arabidopsis thaliana
tgtgtctctctacggcc

SEQ ID NO: 158808 - DNA, 17 bp, Arabidopsis thaliana
tgtgtctgtttcgtcca

SEQ ID NO: 158809 - DNA, 17 bp, Arabidopsis thaliana
tgtgtcttacgatcata

SEQ ID NO: 158810 - DNA, 17 bp, Arabidopsis thaliana
tgtgtctttgtgcccat

SEQ ID NO: 158811 - DNA, 17 bp, Arabidopsis thaliana
tgtgtgaaatgaccggt

SEQ ID NO: 158812 - DNA, 17 bp, Arabidopsis thaliana
tgtgtgaagaagttgca

SEQ ID NO: 158813 - DNA, 17 bp, Arabidopsis thaliana
tgtgtgacgaatgatga

SEQ ID NO: 158814 - DNA, 17 bp, Arabidopsis thaliana
tgtgtgactaattggcg

SEQ ID NO: 158815 - DNA, 17 bp, Arabidopsis thaliana
tgtgtgactctcgaaga

SEQ ID NO: 158816 - DNA, 17 bp, Arabidopsis thaliana
tgtgtgactctggaaga

SEQ ID NO: 158817 - DNA, 17 bp, Arabidopsis thaliana
tgtgtgactctggaatc

SEQ ID NO: 158818 - DNA, 17 bp, Arabidopsis thaliana
tgtgtgactggaatgcc

SEQ ID NO: 158819 - DNA, 17 bp, Arabidopsis thaliana
tgtgtgagatctgtaaa

SEQ ID NO: 158820 - DNA, 17 bp, Arabidopsis thaliana
tgtgtgagattaagctc

SEQ ID NO: 158821 - DNA, 17 bp, Arabidopsis thaliana
tgtgtgatgacgatgtt

SEQ ID NO: 158822 - DNA, 17 bp, Arabidopsis thaliana
tgtgtgattcaaggatc

SEQ ID NO: 158823 - DNA, 17 bp, Arabidopsis thaliana
tgtgtgattcggactct

SEQ ID NO: 158824 - DNA, 17 bp, Arabidopsis thaliana
tgtgtgcacagctcacc

SEQ ID NO: 158825 - DNA, 17 bp, Arabidopsis thaliana
tgtgtgcagctgtcgat

SEQ ID NO: 158826 - DNA, 17 bp, Arabidopsis thaliana
tgtgtgcaggacgttgt

SEQ ID NO: 158827 - DNA, 17 bp, Arabidopsis thaliana
tgtgtgcagtcaacggg

SEQ ID NO: 158828 - DNA, 17 bp, Arabidopsis thaliana
tgtgtgcattgctcgcc

SEQ ID NO: 158829 - DNA, 17 bp, Arabidopsis thaliana
tgtgtgcattgctcggc

SEQ ID NO: 158830 - DNA, 17 bp, Arabidopsis thaliana
tgtgtgcattggtcggc

SEQ ID NO: 158831 - DNA, 17 bp, Arabidopsis thaliana
tgtgtgcattggtcggt

SEQ ID NO: 158832 - DNA, 17 bp, Arabidopsis thaliana
tgtgtgcattgttcggc

SEQ ID NO: 158833 - DNA, 17 bp, Arabidopsis thaliana
tgtgtgcgagtcaacgg

SEQ ID NO: 158834 - DNA, 17 bp, Arabidopsis thaliana
tgtgtgcgatgtgttgg

SEQ ID NO: 158835 - DNA, 17 bp, Arabidopsis thaliana
tgtgtgcgtttacagga

SEQ ID NO: 158836 - DNA, 17 bp, Arabidopsis thaliana
tgtgtgctactatggct

SEQ ID NO: 158837 - DNA, 17 bp, Arabidopsis thaliana
tgtgtggaatgcgattc

SEQ ID NO: 158838 - DNA, 17 bp, Arabidopsis thaliana
tgtgtggaattgtggtg

SEQ ID NO: 158839 - DNA, 17 bp, Arabidopsis thaliana
tgtgtggaccaagatcg

SEQ ID NO: 158840 - DNA, 17 bp, Arabidopsis thaliana
tgtgtggcagactcttc

SEQ ID NO: 158841 - DNA, 17 bp, Arabidopsis thaliana
tgtgtgggtcgcaacta

SEQ ID NO: 158842 - DNA, 17 bp, Arabidopsis thaliana
tgtgtggtagacccttc

SEQ ID NO: 158843 - DNA, 17 bp, Arabidopsis thaliana
tgtgtggtctggacact

SEQ ID NO: 158844 - DNA, 17 bp, Arabidopsis thaliana
tgtgtggtctgggcatt

SEQ ID NO: 158845 - DNA, 17 bp, Arabidopsis thaliana
tgtgtggtggccattgt

SEQ ID NO: 158846 - DNA, 17 bp, Arabidopsis thaliana
tgtgtgtccaactcgac

SEQ ID NO: 158847 - DNA, 17 bp, Arabidopsis thaliana
tgtgtgtccgtcgatta

SEQ ID NO: 158848 - DNA, 17 bp, Arabidopsis thaliana
tgtgtgtcgccgtcgaa

SEQ ID NO: 158849 - DNA, 17 bp, Arabidopsis thaliana
tgtgtgtgaccgagata

SEQ ID NO: 158850 - DNA, 17 bp, Arabidopsis thaliana
tgtgtgtggttatctca

SEQ ID NO: 158851 - DNA, 17 bp, Arabidopsis thaliana
tgtgtgttaagcgaagg

SEQ ID NO: 158852 - DNA, 17 bp, Arabidopsis thaliana
tgtgtgttcacactatg

SEQ ID NO: 158853 - DNA, 17 bp, Arabidopsis thaliana
tgtgtgttgcaaggatg

SEQ ID NO: 158854 - DNA, 17 bp, Arabidopsis thaliana
tgtgtgtttccgtcagg

SEQ ID NO: 158855 - DNA, 17 bp, Arabidopsis thaliana
tgtgtgtttgtattcgg

SEQ ID NO: 158856 - DNA, 17 bp, Arabidopsis thaliana
tgtgttaccatctccgt

SEQ ID NO: 158857 - DNA, 17 bp, Arabidopsis thaliana
tgtgttagacaaaccac

SEQ ID NO: 158858 - DNA, 17 bp, Arabidopsis thaliana
tgtgttagcctttgtct

SEQ ID NO: 158859 - DNA, 17 bp, Arabidopsis thaliana
tgtgttaggccgttacg

SEQ ID NO: 158860 - DNA, 17 bp, Arabidopsis thaliana
tgtgttagggaaatctt

SEQ ID NO: 158861 - DNA, 17 bp, Arabidopsis thaliana
tgtgttataggaacccg

SEQ ID NO: 158862 - DNA, 17 bp, Arabidopsis thaliana
tgtgttatcggactgtc

SEQ ID NO: 158863 - DNA, 17 bp, Arabidopsis thaliana
tgtgttattacctccga

SEQ ID NO: 158864 - DNA, 17 bp, Arabidopsis thaliana
tgtgttcaacagaccga

SEQ ID NO: 158865 - DNA, 17 bp, Arabidopsis thaliana
tgtgttcacactatgcg

SEQ ID NO: 158866 - DNA, 17 bp, Arabidopsis thaliana
tgtgttcaccgatcgga

SEQ ID NO: 158867 - DNA, 17 bp, Arabidopsis thaliana
tgtgttcagccaactca

SEQ ID NO: 158868 - DNA, 17 bp, Arabidopsis thaliana
tgtgttccctaaacgaa

SEQ ID NO: 158869 - DNA, 17 bp, Arabidopsis thaliana
tgtgttcgaatcggact

SEQ ID NO: 158870 - DNA, 17 bp, Arabidopsis thaliana
tgtgttcgctgggtccg

SEQ ID NO: 158871 - DNA, 17 bp, Arabidopsis thaliana
tgtgttcgcttaactta

SEQ ID NO: 158872 - DNA, 17 bp, Arabidopsis thaliana
tgtgttcgttccccaca

SEQ ID NO: 158873 - DNA, 17 bp, Arabidopsis thaliana
tgtgttctcagatcacc

SEQ ID NO: 158874 - DNA, 17 bp, Arabidopsis thaliana
tgtgttctcagctcccc

SEQ ID NO: 158875 - DNA, 17 bp, Arabidopsis thaliana
tgtgttctcagggtcct

SEQ ID NO: 158876 - DNA, 17 bp, Arabidopsis thaliana
tgtgttctcaggtcacc

SEQ ID NO: 158877 - DNA, 17 bp, Arabidopsis thaliana
tgtgttctcaggtcatc

SEQ ID NO: 158878 - DNA, 17 bp, Arabidopsis thaliana
tgtgttctccaacatgt

SEQ ID NO: 158879 - DNA, 17 bp, Arabidopsis thaliana
tgtgttctctgcttctt

SEQ ID NO: 158880 - DNA, 17 bp, Arabidopsis thaliana
tgtgttctgctgtcgtc

SEQ ID NO: 158881 - DNA, 17 bp, Arabidopsis thaliana
tgtgttcttactgagac

SEQ ID NO: 158882 - DNA, 17 bp, Arabidopsis thaliana
tgtgttcttgactagcc

SEQ ID NO: 158883 - DNA, 17 bp, Arabidopsis thaliana
tgtgttgaccaagttcc

SEQ ID NO: 158884 - DNA, 17 bp, Arabidopsis thaliana
tgtgttgaccccgccat

SEQ ID NO: 158885 - DNA, 17 bp, Arabidopsis thaliana
tgtgttgaccgcgccat

SEQ ID NO: 158886 - DNA, 17 bp, Arabidopsis thaliana
tgtgttgacttggctca

SEQ ID NO: 158887 - DNA, 17 bp, Arabidopsis thaliana
tgtgttgagggcagtgg

SEQ ID NO: 158888 - DNA, 17 bp, Arabidopsis thaliana
tgtgttgatgaaaccgc

SEQ ID NO: 158889 - DNA, 17 bp, Arabidopsis thaliana
tgtgttgatgagacgca

SEQ ID NO: 158890 - DNA, 17 bp, Arabidopsis thaliana
tgtgttgcagggaaggc

SEQ ID NO: 158891 - DNA, 17 bp, Arabidopsis thaliana
tgtgttgccaaccaatc

SEQ ID NO: 158892 - DNA, 17 bp, Arabidopsis thaliana
tgtgttggaccagattc

SEQ ID NO: 158893 - DNA, 17 bp, Arabidopsis thaliana
tgtgttggccttcggga

SEQ ID NO: 158894 - DNA, 17 bp, Arabidopsis thaliana
tgtgttgtcactcaggg

SEQ ID NO: 158895 - DNA, 17 bp, Arabidopsis thaliana
tgtgttgtcattgggcc

SEQ ID NO: 158896 - DNA, 17 bp, Arabidopsis thaliana
tgtgttgtgctgctcag

SEQ ID NO: 158897 - DNA, 17 bp, Arabidopsis thaliana
tgtgttgtggcctatcc

SEQ ID NO: 158898 - DNA, 17 bp, Arabidopsis thaliana
tgtgttgttcgtttgac

SEQ ID NO: 158899 - DNA, 17 bp, Arabidopsis thaliana
tgtgttgttttcaggtg

SEQ ID NO: 158900 - DNA, 17 bp, Arabidopsis thaliana
tgtgtttaaaccagtca

SEQ ID NO: 158901 - DNA, 17 bp, Arabidopsis thaliana
tgtgtttacagaagctc

SEQ ID NO: 158902 - DNA, 17 bp, Arabidopsis thaliana
tgtgtttaccggcgaat

SEQ ID NO: 158903 - DNA, 17 bp, Arabidopsis thaliana
tgtgtttcaatcgttgc

SEQ ID NO: 158904 - DNA, 17 bp, Arabidopsis thaliana
tgtgtttcaggtacctt

SEQ ID NO: 158905 - DNA, 17 bp, Arabidopsis thaliana
tgtgtttccgaaataag

SEQ ID NO: 158906 - DNA, 17 bp, Arabidopsis thaliana
tgtgtttccgtcagggc

SEQ ID NO: 158907 - DNA, 17 bp, Arabidopsis thaliana
tgtgtttccttgttcag

SEQ ID NO: 158908 - DNA, 17 bp, Arabidopsis thaliana
tgtgtttcgctaggttt

SEQ ID NO: 158909 - DNA, 17 bp, Arabidopsis thaliana
tgtgtttcttggactac

SEQ ID NO: 158910 - DNA, 17 bp, Arabidopsis thaliana
tgtgtttcttggactag

SEQ ID NO: 158911 - DNA, 17 bp, Arabidopsis thaliana
tgtgtttgagacaaggt

SEQ ID NO: 158912 - DNA, 17 bp, Arabidopsis thaliana
tgtgtttgcagttcttt

SEQ ID NO: 158913 - DNA, 17 bp, Arabidopsis thaliana
tgtgtttgcgggagatt

SEQ ID NO: 158914 - DNA, 17 bp, Arabidopsis thaliana
tgtgtttgtcatattta

SEQ ID NO: 158915 - DNA, 17 bp, Arabidopsis thaliana
tgtgttttaccagcgct

SEQ ID NO: 158916 - DNA, 17 bp, Arabidopsis thaliana
tgtgttttcaggtcacc

SEQ ID NO: 158917 - DNA, 17 bp, Arabidopsis thaliana
tgtgttttcattcaatt

SEQ ID NO: 158918 - DNA, 17 bp, Arabidopsis thaliana
tgtgttttcattctcca

SEQ ID NO: 158919 - DNA, 17 bp, Arabidopsis thaliana
tgtgttttcctcaccga

SEQ ID NO: 158920 - DNA, 17 bp, Arabidopsis thaliana
tgtgttttctgtctggt

SEQ ID NO: 158921 - DNA, 17 bp, Arabidopsis thaliana
tgtgttttgcggtatgt

SEQ ID NO: 158922 - DNA, 17 bp, Arabidopsis thaliana
tgtgttttgctgtcgac

SEQ ID NO: 158923 - DNA, 17 bp, Arabidopsis thaliana
tgtgttttggacttgca

SEQ ID NO: 158924 - DNA, 17 bp, Arabidopsis thaliana
tgtgttttgggtaccag

SEQ ID NO: 158925 - DNA, 17 bp, Arabidopsis thaliana
tgtgtttttcgtttgac

SEQ ID NO: 158926 - DNA, 17 bp, Arabidopsis thaliana
tgttaaccagctgttga

SEQ ID NO: 158927 - DNA, 17 bp, Arabidopsis thaliana
tgttaagcgtgcttggg

SEQ ID NO: 158928 - DNA, 17 bp, Arabidopsis thaliana
tgttaaggttttggtta

SEQ ID NO: 158929 - DNA, 17 bp, Arabidopsis thaliana
tgttaatcgagtcgtat

SEQ ID NO: 158930 - DNA, 17 bp, Arabidopsis thaliana
tgttaatggatttgcgg

SEQ ID NO: 158931 - DNA, 17 bp, Arabidopsis thaliana
tgttaattgagttgccg

SEQ ID NO: 158932 - DNA, 17 bp, Arabidopsis thaliana
tgttacaaaatctacgc

SEQ ID NO: 158933 - DNA, 17 bp, Arabidopsis thaliana
tgttacaacgcgggagg

SEQ ID NO: 158934 - DNA, 17 bp, Arabidopsis thaliana
tgttacaacttttttta

SEQ ID NO: 158935 - DNA, 17 bp, Arabidopsis thaliana
tgttacaagatcgggtt

SEQ ID NO: 158936 - DNA, 17 bp, Arabidopsis thaliana
tgttacactaactaacg

SEQ ID NO: 158937 - DNA, 17 bp, Arabidopsis thaliana
tgttacactttgcgccg

SEQ ID NO: 158938 - DNA, 17 bp, Arabidopsis thaliana
tgttacagcactgttgc

SEQ ID NO: 158939 - DNA, 17 bp, Arabidopsis thaliana
tgttacagcattattgc

SEQ ID NO: 158940 - DNA, 17 bp, Arabidopsis thaliana
tgttacagtgatgtttt

SEQ ID NO: 158941 - DNA, 17 bp, Arabidopsis thaliana
tgttacataatgtggtt

SEQ ID NO: 158942 - DNA, 17 bp, Arabidopsis thaliana
tgttaccgcacacggtt

SEQ ID NO: 158943 - DNA, 17 bp, Arabidopsis thaliana
tgttaccgcacgcggtt

SEQ ID NO: 158944 - DNA, 17 bp, Arabidopsis thaliana
tgttaccggagctgcac

SEQ ID NO: 158945 - DNA, 17 bp, Arabidopsis thaliana
tgttaccgtctaagcgt

SEQ ID NO: 158946 - DNA, 17 bp, Arabidopsis thaliana
tgttacctctgaggctg

SEQ ID NO: 158947 - DNA, 17 bp, Arabidopsis thaliana
tgttacctgttgcagtg

SEQ ID NO: 158948 - DNA, 17 bp, Arabidopsis thaliana
tgttacgacgcgggagg

SEQ ID NO: 158949 - DNA, 17 bp, Arabidopsis thaliana
tgttacggctaaactgc

SEQ ID NO: 158950 - DNA, 17 bp, Arabidopsis thaliana
tgttacgggaaagattc

SEQ ID NO: 158951 - DNA, 17 bp, Arabidopsis thaliana
tgttactaagtaacgtc

SEQ ID NO: 158952 - DNA, 17 bp, Arabidopsis thaliana
tgttactatcgcacccg

SEQ ID NO: 158953 - DNA, 17 bp, Arabidopsis thaliana
tgttactatttgaaccg

SEQ ID NO: 158954 - DNA, 17 bp, Arabidopsis thaliana
tgttactcgacctgata

SEQ ID NO: 158955 - DNA, 17 bp, Arabidopsis thaliana
tgttactcgacctgtca

SEQ ID NO: 158956 - DNA, 17 bp, Arabidopsis thaliana
tgttactcgacttgtca

SEQ ID NO: 158957 - DNA, 17 bp, Arabidopsis thaliana
tgttactcgatcaccca

SEQ ID NO: 158958 - DNA, 17 bp, Arabidopsis thaliana
tgttactcgattgccat

SEQ ID NO: 158959 - DNA, 17 bp, Arabidopsis thaliana
tgttactctgttccgct

SEQ ID NO: 158960 - DNA, 17 bp, Arabidopsis thaliana
tgttactctttgaaccg

SEQ ID NO: 158961 - DNA, 17 bp, Arabidopsis thaliana
tgttactggaccaccat

SEQ ID NO: 158962 - DNA, 17 bp, Arabidopsis thaliana
tgttactgtcgcataac

SEQ ID NO: 158963 - DNA, 17 bp, Arabidopsis thaliana
tgttacttcttaaatgt

SEQ ID NO: 158964 - DNA, 17 bp, Arabidopsis thaliana
tgttacttgaccaccca

SEQ ID NO: 158965 - DNA, 17 bp, Arabidopsis thaliana
tgttacttgactaatac

SEQ ID NO: 158966 - DNA, 17 bp, Arabidopsis thaliana
tgttacttgcacgcagc

SEQ ID NO: 158967 - DNA, 17 bp, Arabidopsis thaliana
tgttacttgcacgctgc

SEQ ID NO: 158968 - DNA, 17 bp, Arabidopsis thaliana
tgttagaaacgcgtttt

SEQ ID NO: 158969 - DNA, 17 bp, Arabidopsis thaliana
tgttagaagtttctttt

SEQ ID NO: 158970 - DNA, 17 bp, Arabidopsis thaliana
tgttagaagtttgtttt

SEQ ID NO: 158971 - DNA, 17 bp, Arabidopsis thaliana
tgttagacaaaccactg

SEQ ID NO: 158972 - DNA, 17 bp, Arabidopsis thaliana
tgttagacacggtgcct

SEQ ID NO: 158973 - DNA, 17 bp, Arabidopsis thaliana
tgttagaccatcaggac

SEQ ID NO: 158974 - DNA, 17 bp, Arabidopsis thaliana
tgttagaccatcttcat

SEQ ID NO: 158975 - DNA, 17 bp, Arabidopsis thaliana
tgttagatactgctttg

SEQ ID NO: 158976 - DNA, 17 bp, Arabidopsis thaliana
tgttagcacgcaagaag

SEQ ID NO: 158977 - DNA, 17 bp, Arabidopsis thaliana
tgttagcagagatggcc

SEQ ID NO: 158978 - DNA, 17 bp, Arabidopsis thaliana
tgttagccgcaacgact

SEQ ID NO: 158979 - DNA, 17 bp, Arabidopsis thaliana
tgttagcgattggcacc

SEQ ID NO: 158980 - DNA, 17 bp, Arabidopsis thaliana
tgttagcgttttcggac

SEQ ID NO: 158981 - DNA, 17 bp, Arabidopsis thaliana
tgttagctccagcgatc

SEQ ID NO: 158982 - DNA, 17 bp, Arabidopsis thaliana
tgttagctctcatctca

SEQ ID NO: 158983 - DNA, 17 bp, Arabidopsis thaliana
tgttaggaaactaggtc

SEQ ID NO: 158984 - DNA, 17 bp, Arabidopsis thaliana
tgttaggttgcacgggg

SEQ ID NO: 158985 - DNA, 17 bp, Arabidopsis thaliana
tgttaggtttacgcgtt

SEQ ID NO: 158986 - DNA, 17 bp, Arabidopsis thaliana
tgttaggtttcgtggca

SEQ ID NO: 158987 - DNA, 17 bp, Arabidopsis thaliana
tgttaggttttcgtggc

SEQ ID NO: 158988 - DNA, 17 bp, Arabidopsis thaliana
tgttagtcgcatcctgt

SEQ ID NO: 158989 - DNA, 17 bp, Arabidopsis thaliana
tgttagtcttatgaaac

SEQ ID NO: 158990 - DNA, 17 bp, Arabidopsis thaliana
tgttagtgaccggctta

SEQ ID NO: 158991 - DNA, 17 bp, Arabidopsis thaliana
tgttagttccgttccaa

SEQ ID NO: 158992 - DNA, 17 bp, Arabidopsis thaliana
tgttagttcgtactatt

SEQ ID NO: 158993 - DNA, 17 bp, Arabidopsis thaliana
tgttagttctctgttgc

SEQ ID NO: 158994 - DNA, 17 bp, Arabidopsis thaliana
tgttagttggagttgtt

SEQ ID NO: 158995 - DNA, 17 bp, Arabidopsis thaliana
tgttagtttcttatcag

SEQ ID NO: 158996 - DNA, 17 bp, Arabidopsis thaliana
tgttagttttgggaagt

SEQ ID NO: 158997 - DNA, 17 bp, Arabidopsis thaliana
tgttatcagttcatgac

SEQ ID NO: 158998 - DNA, 17 bp, Arabidopsis thaliana
tgttatcccggttgcgg

SEQ ID NO: 158999 - DNA, 17 bp, Arabidopsis thaliana
tgttatctctgtggtat

SEQ ID NO: 159000 - DNA, 17 bp, Arabidopsis thaliana
tgttatctctgttgtat

SEQ ID NO: 159001 - DNA, 17 bp, Arabidopsis thaliana
tgttatctggttgcttg

SEQ ID NO: 159002 - DNA, 17 bp, Arabidopsis thaliana
tgttatcttcgatgtgc

SEQ ID NO: 159003 - DNA, 17 bp, Arabidopsis thaliana
tgttatgcaagtggcga

SEQ ID NO: 159004 - DNA, 17 bp, Arabidopsis thaliana
tgttatgcgtcctacct

SEQ ID NO: 159005 - DNA, 17 bp, Arabidopsis thaliana
tgttatgcgtcctatct

SEQ ID NO: 159006 - DNA, 17 bp, Arabidopsis thaliana
tgttatgctttgaggat

SEQ ID NO: 159007 - DNA, 17 bp, Arabidopsis thaliana
tgttatgggacattgac

SEQ ID NO: 159008 - DNA, 17 bp, Arabidopsis thaliana
tgttattaaatgccagt

SEQ ID NO: 159009 - DNA, 17 bp, Arabidopsis thaliana
tgttattaagtaacgtc

SEQ ID NO: 159010 - DNA, 17 bp, Arabidopsis thaliana
tgttattagatttggac

SEQ ID NO: 159011 - DNA, 17 bp, Arabidopsis thaliana
tgttattcagtttcacg

SEQ ID NO: 159012 - DNA, 17 bp, Arabidopsis thaliana
tgttattgcttggcttc

SEQ ID NO: 159013 - DNA, 17 bp, Arabidopsis thaliana
tgttattgcttggcttg

SEQ ID NO: 159014 - DNA, 17 bp, Arabidopsis thaliana
tgttatttctgcgaatt

SEQ ID NO: 159015 - DNA, 17 bp, Arabidopsis thaliana
tgttatttcttggttgt

SEQ ID NO: 159016 - DNA, 17 bp, Arabidopsis thaliana
tgttattttttggcgac

SEQ ID NO: 159017 - DNA, 17 bp, Arabidopsis thaliana
tgttcaaaacagaagca

SEQ ID NO: 159018 - DNA, 17 bp, Arabidopsis thaliana
tgttcaaaacggcttgg

SEQ ID NO: 159019 - DNA, 17 bp, Arabidopsis thaliana
tgttcaaactcggcctg

SEQ ID NO: 159020 - DNA, 17 bp, Arabidopsis thaliana
tgttcaaaggccgagac

SEQ ID NO: 159021 - DNA, 17 bp, Arabidopsis thaliana
tgttcaactacagtcgt

SEQ ID NO: 159022 - DNA, 17 bp, Arabidopsis thaliana
tgttcaagcccgcaagg

SEQ ID NO: 159023 - DNA, 17 bp, Arabidopsis thaliana
tgttcaagccggattgt

SEQ ID NO: 159024 - DNA, 17 bp, Arabidopsis thaliana
tgttcaatcattcattg

SEQ ID NO: 159025 - DNA, 17 bp, Arabidopsis thaliana
tgttcaatcttgggcct

SEQ ID NO: 159026 - DNA, 17 bp, Arabidopsis thaliana
tgttcaccggagccttt

SEQ ID NO: 159027 - DNA, 17 bp, Arabidopsis thaliana
tgttcacctctctttct

SEQ ID NO: 159028 - DNA, 17 bp, Arabidopsis thaliana
tgttcaccttttttggc

SEQ ID NO: 159029 - DNA, 17 bp, Arabidopsis thaliana
tgttcacggatcataag

SEQ ID NO: 159030 - DNA, 17 bp, Arabidopsis thaliana
tgttcacgtctgatcga

SEQ ID NO: 159031 - DNA, 17 bp, Arabidopsis thaliana
tgttcactgttggcaac

SEQ ID NO: 159032 - DNA, 17 bp, Arabidopsis thaliana
tgttcacttaggactgc

SEQ ID NO: 159033 - DNA, 17 bp, Arabidopsis thaliana
tgttcacttggctagtt

SEQ ID NO: 159034 - DNA, 17 bp, Arabidopsis thaliana
tgttcagccctttgtcg

SEQ ID NO: 159035 - DNA, 17 bp, Arabidopsis thaliana
tgttcagcttaagaacc

SEQ ID NO: 159036 - DNA, 17 bp, Arabidopsis thaliana
tgttcaggctgtgttgc

SEQ ID NO: 159037 - DNA, 17 bp, Arabidopsis thaliana
tgttcagttctcagttg

SEQ ID NO: 159038 - DNA, 17 bp, Arabidopsis thaliana
tgttcagttgatggtga

SEQ ID NO: 159039 - DNA, 17 bp, Arabidopsis thaliana
tgttcagtttacagcta

SEQ ID NO: 159040 - DNA, 17 bp, Arabidopsis thaliana
tgttcagttttgctcat

SEQ ID NO: 159041 - DNA, 17 bp, Arabidopsis thaliana
tgttcataacggtgatg

SEQ ID NO: 159042 - DNA, 17 bp, Arabidopsis thaliana
tgttcataagcataagc

SEQ ID NO: 159043 - DNA, 17 bp, Arabidopsis thaliana
tgttcatagtcgaccaa

SEQ ID NO: 159044 - DNA, 17 bp, Arabidopsis thaliana
tgttcatatcccacagt

SEQ ID NO: 159045 - DNA, 17 bp, Arabidopsis thaliana
tgttcatattcatttct

SEQ ID NO: 159046 - DNA, 17 bp, Arabidopsis thaliana
tgttcatccaaatggac

SEQ ID NO: 159047 - DNA, 17 bp, Arabidopsis thaliana
tgttcatcccactgctg

SEQ ID NO: 159048 - DNA, 17 bp, Arabidopsis thaliana
tgttcatccgacgtgca

SEQ ID NO: 159049 - DNA, 17 bp, Arabidopsis thaliana
tgttcatctccaaagtg

SEQ ID NO: 159050 - DNA, 17 bp, Arabidopsis thaliana
tgttcatctgctgctgc

SEQ ID NO: 159051 - DNA, 17 bp, Arabidopsis thaliana
tgttcatcttcagcatg

SEQ ID NO: 159052 - DNA, 17 bp, Arabidopsis thaliana
tgttcatgagcctttgt

SEQ ID NO: 159053 - DNA, 17 bp, Arabidopsis thaliana
tgttcatggttttgccc

SEQ ID NO: 159054 - DNA, 17 bp, Arabidopsis thaliana
tgttcatgttcggtgtg

SEQ ID NO: 159055 - DNA, 17 bp, Arabidopsis thaliana
tgttcattctgctgaag

SEQ ID NO: 159056 - DNA, 17 bp, Arabidopsis thaliana
tgttcatttgcctgtcg

SEQ ID NO: 159057 - DNA, 17 bp, Arabidopsis thaliana
tgttccaaccagttttg

SEQ ID NO: 159058 - DNA, 17 bp, Arabidopsis thaliana
tgttccaaccatgtcgg

SEQ ID NO: 159059 - DNA, 17 bp, Arabidopsis thaliana
tgttccaacgacaattg

SEQ ID NO: 159060 - DNA, 17 bp, Arabidopsis thaliana
tgttccaagggttgggc

SEQ ID NO: 159061 - DNA, 17 bp, Arabidopsis thaliana
tgttccaagtgtcggat

SEQ ID NO: 159062 - DNA, 17 bp, Arabidopsis thaliana
tgttccagcaatcagca

SEQ ID NO: 159063 - DNA, 17 bp, Arabidopsis thaliana
tgttccagcgacgcagc

SEQ ID NO: 159064 - DNA, 17 bp, Arabidopsis thaliana
tgttccaggaatgttca

SEQ ID NO: 159065 - DNA, 17 bp, Arabidopsis thaliana
tgttccagttccagcta

SEQ ID NO: 159066 - DNA, 17 bp, Arabidopsis thaliana
tgttccatcatcacttc

SEQ ID NO: 159067 - DNA, 17 bp, Arabidopsis thaliana
tgttccatcatcacttg

SEQ ID NO: 159068 - DNA, 17 bp, Arabidopsis thaliana
tgttccatccttaaggt

SEQ ID NO: 159069 - DNA, 17 bp, Arabidopsis thaliana
tgttccatgcttctagt

SEQ ID NO: 159070 - DNA, 17 bp, Arabidopsis thaliana
tgttccatgcttctttt

SEQ ID NO: 159071 - DNA, 17 bp, Arabidopsis thaliana
tgttccattgaccaatg

SEQ ID NO: 159072 - DNA, 17 bp, Arabidopsis thaliana
tgttcccattcggatgg

SEQ ID NO: 159073 - DNA, 17 bp, Arabidopsis thaliana
tgttcccattgactttt

SEQ ID NO: 159074 - DNA, 17 bp, Arabidopsis thaliana
tgttcccgcggtgtacc

SEQ ID NO: 159075 - DNA, 17 bp, Arabidopsis thaliana
tgttcccgtggtatacc

SEQ ID NO: 159076 - DNA, 17 bp, Arabidopsis thaliana
tgttccctgggattggc

SEQ ID NO: 159077 - DNA, 17 bp, Arabidopsis thaliana
tgttccctgttgactag

SEQ ID NO: 159078 - DNA, 17 bp, Arabidopsis thaliana
tgttccgactcatagaa

SEQ ID NO: 159079 - DNA, 17 bp, Arabidopsis thaliana
tgttccgagactacccg

SEQ ID NO: 159080 - DNA, 17 bp, Arabidopsis thaliana
tgttccgagactatccg

SEQ ID NO: 159081 - DNA, 17 bp, Arabidopsis thaliana
tgttccgagtctacttg

SEQ ID NO: 159082 - DNA, 17 bp, Arabidopsis thaliana
tgttccgatcgcggcga

SEQ ID NO: 159083 - DNA, 17 bp, Arabidopsis thaliana
tgttccgattctgatag

SEQ ID NO: 159084 - DNA, 17 bp, Arabidopsis thaliana
tgttccgcaccacctac

SEQ ID NO: 159085 - DNA, 17 bp, Arabidopsis thaliana
tgttccgcactaactgc

SEQ ID NO: 159086 - DNA, 17 bp, Arabidopsis thaliana
tgttccgcgctgcacat

SEQ ID NO: 159087 - DNA, 17 bp, Arabidopsis thaliana
tgttccgttaacacgac

SEQ ID NO: 159088 - DNA, 17 bp, Arabidopsis thaliana
tgttcctatcgagacac

SEQ ID NO: 159089 - DNA, 17 bp, Arabidopsis thaliana
tgttcctatcgagactg

SEQ ID NO: 159090 - DNA, 17 bp, Arabidopsis thaliana
tgttcctcactgtgcaa

SEQ ID NO: 159091 - DNA, 17 bp, Arabidopsis thaliana
tgttcctccgcagtcag

SEQ ID NO: 159092 - DNA, 17 bp, Arabidopsis thaliana
tgttcctcgaagctaat

SEQ ID NO: 159093 - DNA, 17 bp, Arabidopsis thaliana
tgttcctctgacggtcc

SEQ ID NO: 159094 - DNA, 17 bp, Arabidopsis thaliana
tgttcctgagaactggt

SEQ ID NO: 159095 - DNA, 17 bp, Arabidopsis thaliana
tgttcctgcgtgtgggc

SEQ ID NO: 159096 - DNA, 17 bp, Arabidopsis thaliana
tgttccttaccctgcgg

SEQ ID NO: 159097 - DNA, 17 bp, Arabidopsis thaliana
tgttccttagacctttg

SEQ ID NO: 159098 - DNA, 17 bp, Arabidopsis thaliana
tgttccttcagctgtgt

SEQ ID NO: 159099 - DNA, 17 bp, Arabidopsis thaliana
tgttccttctggccatc

SEQ ID NO: 159100 - DNA, 17 bp, Arabidopsis thaliana
tgttccttctggccatt

SEQ ID NO: 159101 - DNA, 17 bp, Arabidopsis thaliana
tgttccttgcgcagtaa

SEQ ID NO: 159102 - DNA, 17 bp, Arabidopsis thaliana
tgttccttgtacaactc

SEQ ID NO: 159103 - DNA, 17 bp, Arabidopsis thaliana
tgttcctttcttcagca

SEQ ID NO: 159104 - DNA, 17 bp, Arabidopsis thaliana
tgttcgaacccgggctc

SEQ ID NO: 159105 - DNA, 17 bp, Arabidopsis thaliana
tgttcgaaggtcgtcta

SEQ ID NO: 159106 - DNA, 17 bp, Arabidopsis thaliana
tgttcgacctattatcg

SEQ ID NO: 159107 - DNA, 17 bp, Arabidopsis thaliana
tgttcgacttcttgggg

SEQ ID NO: 159108 - DNA, 17 bp, Arabidopsis thaliana
tgttcgagaacaagatc

SEQ ID NO: 159109 - DNA, 17 bp, Arabidopsis thaliana
tgttcgaggcaactagg

SEQ ID NO: 159110 - DNA, 17 bp, Arabidopsis thaliana
tgttcgatccacgctca

SEQ ID NO: 159111 - DNA, 17 bp, Arabidopsis thaliana
tgttcgatgactggttt

SEQ ID NO: 159112 - DNA, 17 bp, Arabidopsis thaliana
tgttcgattccggagag

SEQ ID NO: 159113 - DNA, 17 bp, Arabidopsis thaliana
tgttcgattcggtgctc

SEQ ID NO: 159114 - DNA, 17 bp, Arabidopsis thaliana
tgttcgattgagccgtg

SEQ ID NO: 159115 - DNA, 17 bp, Arabidopsis thaliana
tgttcgcaagcgtctac

SEQ ID NO: 159116 - DNA, 17 bp, Arabidopsis thaliana
tgttcgccgatttgtgt

SEQ ID NO: 159117 - DNA, 17 bp, Arabidopsis thaliana
tgttcgcggtggtctag

SEQ ID NO: 159118 - DNA, 17 bp, Arabidopsis thaliana
tgttcgctaagttgagc

SEQ ID NO: 159119 - DNA, 17 bp, Arabidopsis thaliana
tgttcgctaggaccctt

SEQ ID NO: 159120 - DNA, 17 bp, Arabidopsis thaliana
tgttcgctccacgctca

SEQ ID NO: 159121 - DNA, 17 bp, Arabidopsis thaliana
tgttcggaatcacaatt

SEQ ID NO: 159122 - DNA, 17 bp, Arabidopsis thaliana
tgttcggatcctggata

SEQ ID NO: 159123 - DNA, 17 bp, Arabidopsis thaliana
tgttcggatcgcggcga

SEQ ID NO: 159124 - DNA, 17 bp, Arabidopsis thaliana
tgttcggctaaaccggg

SEQ ID NO: 159125 - DNA, 17 bp, Arabidopsis thaliana
tgttcgggaggttggcc

SEQ ID NO: 159126 - DNA, 17 bp, Arabidopsis thaliana
tgttcgggctctatctg

SEQ ID NO: 159127 - DNA, 17 bp, Arabidopsis thaliana
tgttcggggacatctgg

SEQ ID NO: 159128 - DNA, 17 bp, Arabidopsis thaliana
tgttcgggttggtgaag

SEQ ID NO: 159129 - DNA, 17 bp, Arabidopsis thaliana
tgttcggtgtgacgagg

SEQ ID NO: 159130 - DNA, 17 bp, Arabidopsis thaliana
tgttcggttcacgtcgg

SEQ ID NO: 159131 - DNA, 17 bp, Arabidopsis thaliana
tgttcggttcggtttgc

SEQ ID NO: 159132 - DNA, 17 bp, Arabidopsis thaliana
tgttcggttttagggca

SEQ ID NO: 159133 - DNA, 17 bp, Arabidopsis thaliana
tgttcgtaacctgaaag

SEQ ID NO: 159134 - DNA, 17 bp, Arabidopsis thaliana
tgttcgtagccatgcag

SEQ ID NO: 159135 - DNA, 17 bp, Arabidopsis thaliana
tgttcgtcagtccttgc

SEQ ID NO: 159136 - DNA, 17 bp, Arabidopsis thaliana
tgttcgtcctcgcctcc

SEQ ID NO: 159137 - DNA, 17 bp, Arabidopsis thaliana
tgttcgtcggcggaggt

SEQ ID NO: 159138 - DNA, 17 bp, Arabidopsis thaliana
tgttcgtcttgtttgag

SEQ ID NO: 159139 - DNA, 17 bp, Arabidopsis thaliana
tgttcgtgaggttggcc

SEQ ID NO: 159140 - DNA, 17 bp, Arabidopsis thaliana
tgttcgtgatcggtcat

SEQ ID NO: 159141 - DNA, 17 bp, Arabidopsis thaliana
tgttcgtggaagatcgt

SEQ ID NO: 159142 - DNA, 17 bp, Arabidopsis thaliana
tgttcgtggcaactagg

SEQ ID NO: 159143 - DNA, 17 bp, Arabidopsis thaliana
tgttcgtggtatgaccc

SEQ ID NO: 159144 - DNA, 17 bp, Arabidopsis thaliana
tgttcgttccacgcact

SEQ ID NO: 159145 - DNA, 17 bp, Arabidopsis thaliana
tgttcgttccacgctca

SEQ ID NO: 159146 - DNA, 17 bp, Arabidopsis thaliana
tgttcgttccacgttca

SEQ ID NO: 159147 - DNA, 17 bp, Arabidopsis thaliana
tgttcgtttcacctcgg

SEQ ID NO: 159148 - DNA, 17 bp, Arabidopsis thaliana
tgttcgtttcacgtcgg

SEQ ID NO: 159149 - DNA, 17 bp, Arabidopsis thaliana
tgttcgtttccctgtcg

SEQ ID NO: 159150 - DNA, 17 bp, Arabidopsis thaliana
tgttcgtttctctgtcg

SEQ ID NO: 159151 - DNA, 17 bp, Arabidopsis thaliana
tgttcgtttgactgtcg

SEQ ID NO: 159152 - DNA, 17 bp, Arabidopsis thaliana
tgttcgtttgatcagtc

SEQ ID NO: 159153 - DNA, 17 bp, Arabidopsis thaliana
tgttcgtttgcatgtcg

SEQ ID NO: 159154 - DNA, 17 bp, Arabidopsis thaliana
tgttcgtttgcctgtcg

SEQ ID NO: 159155 - DNA, 17 bp, Arabidopsis thaliana
tgttcgtttgcctgtct

SEQ ID NO: 159156 - DNA, 17 bp, Arabidopsis thaliana
tgttcgtttgctcattt

SEQ ID NO: 159157 - DNA, 17 bp, Arabidopsis thaliana
tgttcgtttgcttatcg

SEQ ID NO: 159158 - DNA, 17 bp, Arabidopsis thaliana
tgttcgtttgcttgtcg

SEQ ID NO: 159159 - DNA, 17 bp, Arabidopsis thaliana
tgttcgtttgcttgttg

SEQ ID NO: 159160 - DNA, 17 bp, Arabidopsis thaliana
tgttcgtttggaccgca

SEQ ID NO: 159161 - DNA, 17 bp, Arabidopsis thaliana
tgttcgtttgtctatcg

SEQ ID NO: 159162 - DNA, 17 bp, Arabidopsis thaliana
tgttcgtttgtctgtcg

SEQ ID NO: 159163 - DNA, 17 bp, Arabidopsis thaliana
tgttcgtttgtttgtcg

SEQ ID NO: 159164 - DNA, 17 bp, Arabidopsis thaliana
tgttcgttttgggaatc

SEQ ID NO: 159165 - DNA, 17 bp, Arabidopsis thaliana
tgttctaagtaggcatg

SEQ ID NO: 159166 - DNA, 17 bp, Arabidopsis thaliana
tgttctacaagctcggc

SEQ ID NO: 159167 - DNA, 17 bp, Arabidopsis thaliana
tgttctacctcaacttg

SEQ ID NO: 159168 - DNA, 17 bp, Arabidopsis thaliana
tgttctatcggagcaat

SEQ ID NO: 159169 - DNA, 17 bp, Arabidopsis thaliana
tgttctatttcggtggg

SEQ ID NO: 159170 - DNA, 17 bp, Arabidopsis thaliana
tgttctatttgtgtttg

SEQ ID NO: 159171 - DNA, 17 bp, Arabidopsis thaliana
tgttctccaacatgttt

SEQ ID NO: 159172 - DNA, 17 bp, Arabidopsis thaliana
tgttctcccatgggagc

SEQ ID NO: 159173 - DNA, 17 bp, Arabidopsis thaliana
tgttctcccctcttaag

SEQ ID NO: 159174 - DNA, 17 bp, Arabidopsis thaliana
tgttctccgctaacagg

SEQ ID NO: 159175 - DNA, 17 bp, Arabidopsis thaliana
tgttctccggccagaaa

SEQ ID NO: 159176 - DNA, 17 bp, Arabidopsis thaliana
tgttctccggtgtctac

SEQ ID NO: 159177 - DNA, 17 bp, Arabidopsis thaliana
tgttctcctatctgctc

SEQ ID NO: 159178 - DNA, 17 bp, Arabidopsis thaliana
tgttctcctgaatcttc

SEQ ID NO: 159179 - DNA, 17 bp, Arabidopsis thaliana
tgttctcgaggcgtcta

SEQ ID NO: 159180 - DNA, 17 bp, Arabidopsis thaliana
tgttctcgctttgtgtc

SEQ ID NO: 159181 - DNA, 17 bp, Arabidopsis thaliana
tgttctcggagggccag

SEQ ID NO: 159182 - DNA, 17 bp, Arabidopsis thaliana
tgttctcggtgagaaac

SEQ ID NO: 159183 - DNA, 17 bp, Arabidopsis thaliana
tgttctcgttgcacagg

SEQ ID NO: 159184 - DNA, 17 bp, Arabidopsis thaliana
tgttctctggtgttgtt

SEQ ID NO: 159185 - DNA, 17 bp, Arabidopsis thaliana
tgttctgacatctcagc

SEQ ID NO: 159186 - DNA, 17 bp, Arabidopsis thaliana
tgttctgacctgaggaa

SEQ ID NO: 159187 - DNA, 17 bp, Arabidopsis thaliana
tgttctgacgtgggagc

SEQ ID NO: 159188 - DNA, 17 bp, Arabidopsis thaliana
tgttctgagactacccg

SEQ ID NO: 159189 - DNA, 17 bp, Arabidopsis thaliana
tgttctgagactactca

SEQ ID NO: 159190 - DNA, 17 bp, Arabidopsis thaliana
tgttctgatctaaccag

SEQ ID NO: 159191 - DNA, 17 bp, Arabidopsis thaliana
tgttctgcactgtgcaa

SEQ ID NO: 159192 - DNA, 17 bp, Arabidopsis thaliana
tgttctgcagatcagtc

SEQ ID NO: 159193 - DNA, 17 bp, Arabidopsis thaliana
tgttctgcgctgcacat

SEQ ID NO: 159194 - DNA, 17 bp, Arabidopsis thaliana
tgttctgcttgatgtgc

SEQ ID NO: 159195 - DNA, 17 bp, Arabidopsis thaliana
tgttctgcttggactct

SEQ ID NO: 159196 - DNA, 17 bp, Arabidopsis thaliana
tgttctgctttctcgaa

SEQ ID NO: 159197 - DNA, 17 bp, Arabidopsis thaliana
tgttctgggccgcaccc

SEQ ID NO: 159198 - DNA, 17 bp, Arabidopsis thaliana
tgttctgtagatcgtct

SEQ ID NO: 159199 - DNA, 17 bp, Arabidopsis thaliana
tgttctgtagttgatgg

SEQ ID NO: 159200 - DNA, 17 bp, Arabidopsis thaliana
tgttctgttgcggtggc

SEQ ID NO: 159201 - DNA, 17 bp, Arabidopsis thaliana
tgttctgttttagggcg

SEQ ID NO: 159202 - DNA, 17 bp, Arabidopsis thaliana
tgttcttcacttcagga

SEQ ID NO: 159203 - DNA, 17 bp, Arabidopsis thaliana
tgttcttctgaaaacca

SEQ ID NO: 159204 - DNA, 17 bp, Arabidopsis thaliana
tgttcttcttaatttgc

SEQ ID NO: 159205 - DNA, 17 bp, Arabidopsis thaliana
tgttcttgagtagcaca

SEQ ID NO: 159206 - DNA, 17 bp, Arabidopsis thaliana
tgttcttgatgatgaat

SEQ ID NO: 159207 - DNA, 17 bp, Arabidopsis thaliana
tgttcttgctggactac

SEQ ID NO: 159208 - DNA, 17 bp, Arabidopsis thaliana
tgttcttggtgttgcaa

SEQ ID NO: 159209 - DNA, 17 bp, Arabidopsis thaliana
tgttcttgtctagcggt

SEQ ID NO: 159210 - DNA, 17 bp, Arabidopsis thaliana
tgttcttgtctgtctga

SEQ ID NO: 159211 - DNA, 17 bp, Arabidopsis thaliana
tgttcttgtgttttgga

SEQ ID NO: 159212 - DNA, 17 bp, Arabidopsis thaliana
tgttcttgttgcaggga

SEQ ID NO: 159213 - DNA, 17 bp, Arabidopsis thaliana
tgttctttagtaatcca

SEQ ID NO: 159214 - DNA, 17 bp, Arabidopsis thaliana
tgttctttgattgatcg

SEQ ID NO: 159215 - DNA, 17 bp, Arabidopsis thaliana
tgttctttggtcgattt

SEQ ID NO: 159216 - DNA, 17 bp, Arabidopsis thaliana
tgttctttgtgttgatt

SEQ ID NO: 159217 - DNA, 17 bp, Arabidopsis thaliana
tgttcttttccctgtcc

SEQ ID NO: 159218 - DNA, 17 bp, Arabidopsis thaliana
tgttcttttccctgtcg

SEQ ID NO: 159219 - DNA, 17 bp, Arabidopsis thaliana
tgttcttttggagtttt

SEQ ID NO: 159220 - DNA, 17 bp, Arabidopsis thaliana
tgttcttttttcacacg

SEQ ID NO: 159221 - DNA, 17 bp, Arabidopsis thaliana
tgttgaacgtcgatggt

SEQ ID NO: 159222 - DNA, 17 bp, Arabidopsis thaliana
tgttgaactggacggca

SEQ ID NO: 159223 - DNA, 17 bp, Arabidopsis thaliana
tgttgaactggatagcg

SEQ ID NO: 159224 - DNA, 17 bp, Arabidopsis thaliana
tgttgaactggttgttg

SEQ ID NO: 159225 - DNA, 17 bp, Arabidopsis thaliana
tgttgaagacgctgtga

SEQ ID NO: 159226 - DNA, 17 bp, Arabidopsis thaliana
tgttgaagtccgaggtg

SEQ ID NO: 159227 - DNA, 17 bp, Arabidopsis thaliana
tgttgaagttctggcgg

SEQ ID NO: 159228 - DNA, 17 bp, Arabidopsis thaliana
tgttgaatctttaatct

SEQ ID NO: 159229 - DNA, 17 bp, Arabidopsis thaliana
tgttgaatgatgaaagc

SEQ ID NO: 159230 - DNA, 17 bp, Arabidopsis thaliana
tgttgaatggctctatg

SEQ ID NO: 159231 - DNA, 17 bp, Arabidopsis thaliana
tgttgaattgtgacata

SEQ ID NO: 159232 - DNA, 17 bp, Arabidopsis thaliana
tgttgacagttgctgca

SEQ ID NO: 159233 - DNA, 17 bp, Arabidopsis thaliana
tgttgacagttgctgcg

SEQ ID NO: 159234 - DNA, 17 bp, Arabidopsis thaliana
tgttgacagttggtgca

SEQ ID NO: 159235 - DNA, 17 bp, Arabidopsis thaliana
tgttgaccaagttccag

SEQ ID NO: 159236 - DNA, 17 bp, Arabidopsis thaliana
tgttgaccctcagtagg

SEQ ID NO: 159237 - DNA, 17 bp, Arabidopsis thaliana
tgttgaccgactttaga

SEQ ID NO: 159238 - DNA, 17 bp, Arabidopsis thaliana
tgttgaccggcatagtt

SEQ ID NO: 159239 - DNA, 17 bp, Arabidopsis thaliana
tgttgacctcgcatgtg

SEQ ID NO: 159240 - DNA, 17 bp, Arabidopsis thaliana
tgttgacgaagcgttgg

SEQ ID NO: 159241 - DNA, 17 bp, Arabidopsis thaliana
tgttgacgcaatagctg

SEQ ID NO: 159242 - DNA, 17 bp, Arabidopsis thaliana
tgttgacggcgggtggt

SEQ ID NO: 159243 - DNA, 17 bp, Arabidopsis thaliana
tgttgacggttgcccca

SEQ ID NO: 159244 - DNA, 17 bp, Arabidopsis thaliana
tgttgacgtggacatca

SEQ ID NO: 159245 - DNA, 17 bp, Arabidopsis thaliana
tgttgactaaccttcgt

SEQ ID NO: 159246 - DNA, 17 bp, Arabidopsis thaliana
tgttgactacacggctt

SEQ ID NO: 159247 - DNA, 17 bp, Arabidopsis thaliana
tgttgactacgtcggca

SEQ ID NO: 159248 - DNA, 17 bp, Arabidopsis thaliana
tgttgactgtgccattt

SEQ ID NO: 159249 - DNA, 17 bp, Arabidopsis thaliana
tgttgacttgcagcctc

SEQ ID NO: 159250 - DNA, 17 bp, Arabidopsis thaliana
tgttgagaatctggatg

SEQ ID NO: 159251 - DNA, 17 bp, Arabidopsis thaliana
tgttgagagttaaaacg

SEQ ID NO: 159252 - DNA, 17 bp, Arabidopsis thaliana
tgttgagatcgtgtggg

SEQ ID NO: 159253 - DNA, 17 bp, Arabidopsis thaliana
tgttgagcagcctaaag

SEQ ID NO: 159254 - DNA, 17 bp, Arabidopsis thaliana
tgttgagcaggtttctt

SEQ ID NO: 159255 - DNA, 17 bp, Arabidopsis thaliana
tgttgagccaaccttgc

SEQ ID NO: 159256 - DNA, 17 bp, Arabidopsis thaliana
tgttgagcttgactcgg

SEQ ID NO: 159257 - DNA, 17 bp, Arabidopsis thaliana
tgttgagcttgactcta

SEQ ID NO: 159258 - DNA, 17 bp, Arabidopsis thaliana
tgttgaggctccatcta

SEQ ID NO: 159259 - DNA, 17 bp, Arabidopsis thaliana
tgttgagggagtctggg

SEQ ID NO: 159260 - DNA, 17 bp, Arabidopsis thaliana
tgttgaggttagtaggc

SEQ ID NO: 159261 - DNA, 17 bp, Arabidopsis thaliana
tgttgaggtttcacatg

SEQ ID NO: 159262 - DNA, 17 bp, Arabidopsis thaliana
tgttgagtagaccttgt

SEQ ID NO: 159263 - DNA, 17 bp, Arabidopsis thaliana
tgttgagtgggattcgg

SEQ ID NO: 159264 - DNA, 17 bp, Arabidopsis thaliana
tgttgagttcgctattc

SEQ ID NO: 159265 - DNA, 17 bp, Arabidopsis thaliana
tgttgagtttgcgcttc

SEQ ID NO: 159266 - DNA, 17 bp, Arabidopsis thaliana
tgttgatagttgctgca

SEQ ID NO: 159267 - DNA, 17 bp, Arabidopsis thaliana
tgttgatcaccgttcgc

SEQ ID NO: 159268 - DNA, 17 bp, Arabidopsis thaliana
tgttgatcggatggtag

SEQ ID NO: 159269 - DNA, 17 bp, Arabidopsis thaliana
tgttgatgagagacatg

SEQ ID NO: 159270 - DNA, 17 bp, Arabidopsis thaliana
tgttgatgagtgaacga

SEQ ID NO: 159271 - DNA, 17 bp, Arabidopsis thaliana
tgttgatgatgtgcaat

SEQ ID NO: 159272 - DNA, 17 bp, Arabidopsis thaliana
tgttgattaaaccaccg

SEQ ID NO: 159273 - DNA, 17 bp, Arabidopsis thaliana
tgttgattctatgggtg

SEQ ID NO: 159274 - DNA, 17 bp, Arabidopsis thaliana
tgttgattcttcggaca

SEQ ID NO: 159275 - DNA, 17 bp, Arabidopsis thaliana
tgttgattttgcgtttg

SEQ ID NO: 159276 - DNA, 17 bp, Arabidopsis thaliana
tgttgcaccatctactt

SEQ ID NO: 159277 - DNA, 17 bp, Arabidopsis thaliana
tgttgcagcatggatct

SEQ ID NO: 159278 - DNA, 17 bp, Arabidopsis thaliana
tgttgcaggagtcaccg

SEQ ID NO: 159279 - DNA, 17 bp, Arabidopsis thaliana
tgttgcagggagtctac

SEQ ID NO: 159280 - DNA, 17 bp, Arabidopsis thaliana
tgttgcagtgcggtttt

SEQ ID NO: 159281 - DNA, 17 bp, Arabidopsis thaliana
tgttgcagtgtgatttt

SEQ ID NO: 159282 - DNA, 17 bp, Arabidopsis thaliana
tgttgcagttaaacttc

SEQ ID NO: 159283 - DNA, 17 bp, Arabidopsis thaliana
tgttgccacaccgccat

SEQ ID NO: 159284 - DNA, 17 bp, Arabidopsis thaliana
tgttgcccacgattttt

SEQ ID NO: 159285 - DNA, 17 bp, Arabidopsis thaliana
tgttgccgcagtaccga

SEQ ID NO: 159286 - DNA, 17 bp, Arabidopsis thaliana
tgttgcctgctgggaca

SEQ ID NO: 159287 - DNA, 17 bp, Arabidopsis thaliana
tgttgccttgctcgcat

SEQ ID NO: 159288 - DNA, 17 bp, Arabidopsis thaliana
tgttgcgacggatttgt

SEQ ID NO: 159289 - DNA, 17 bp, Arabidopsis thaliana
tgttgcgatacggtttt

SEQ ID NO: 159290 - DNA, 17 bp, Arabidopsis thaliana
tgttgcgattgtgtggc

SEQ ID NO: 159291 - DNA, 17 bp, Arabidopsis thaliana
tgttgcgcttggtgtct

SEQ ID NO: 159292 - DNA, 17 bp, Arabidopsis thaliana
tgttgcggcacggagct

SEQ ID NO: 159293 - DNA, 17 bp, Arabidopsis thaliana
tgttgcggcccgttttc

SEQ ID NO: 159294 - DNA, 17 bp, Arabidopsis thaliana
tgttgcggcggaggttg

SEQ ID NO: 159295 - DNA, 17 bp, Arabidopsis thaliana
tgttgcggctgacttac

SEQ ID NO: 159296 - DNA, 17 bp, Arabidopsis thaliana
tgttgcggtgcagtttt

SEQ ID NO: 159297 - DNA, 17 bp, Arabidopsis thaliana
tgttgcggtgcggtccc

SEQ ID NO: 159298 - DNA, 17 bp, Arabidopsis thaliana
tgttgcggtgcggtttt

SEQ ID NO: 159299 - DNA, 17 bp, Arabidopsis thaliana
tgttgcggtggttgatc

SEQ ID NO: 159300 - DNA, 17 bp, Arabidopsis thaliana
tgttgcggttctcttca

SEQ ID NO: 159301 - DNA, 17 bp, Arabidopsis thaliana
tgttgcggtttaagttc

SEQ ID NO: 159302 - DNA, 17 bp, Arabidopsis thaliana
tgttgcgtccaccatca

SEQ ID NO: 159303 - DNA, 17 bp, Arabidopsis thaliana
tgttgcgtctggacatc

SEQ ID NO: 159304 - DNA, 17 bp, Arabidopsis thaliana
tgttgcgtttaacggct

SEQ ID NO: 159305 - DNA, 17 bp, Arabidopsis thaliana
tgttgcgttttctccgg

SEQ ID NO: 159306 - DNA, 17 bp, Arabidopsis thaliana
tgttgctagtcgagcga

SEQ ID NO: 159307 - DNA, 17 bp, Arabidopsis thaliana
tgttgctatggtgccat

SEQ ID NO: 159308 - DNA, 17 bp, Arabidopsis thaliana
tgttgctcacaattgcc

SEQ ID NO: 159309 - DNA, 17 bp, Arabidopsis thaliana
tgttgctcagccacttc

SEQ ID NO: 159310 - DNA, 17 bp, Arabidopsis thaliana
tgttgctctgactaagt

SEQ ID NO: 159311 - DNA, 17 bp, Arabidopsis thaliana
tgttgctgctctgccat

SEQ ID NO: 159312 - DNA, 17 bp, Arabidopsis thaliana
tgttgctgtagattgct

SEQ ID NO: 159313 - DNA, 17 bp, Arabidopsis thaliana
tgttgcttgggttccat

SEQ ID NO: 159314 - DNA, 17 bp, Arabidopsis thaliana
tgttgctttatgacaac

SEQ ID NO: 159315 - DNA, 17 bp, Arabidopsis thaliana
tgttggaaatgtggatc

SEQ ID NO: 159316 - DNA, 17 bp, Arabidopsis thaliana
tgttggaacaggtgtat

SEQ ID NO: 159317 - DNA, 17 bp, Arabidopsis thaliana
tgttggaagtgtgatct

SEQ ID NO: 159318 - DNA, 17 bp, Arabidopsis thaliana
tgttggaatgtggattt

SEQ ID NO: 159319 - DNA, 17 bp, Arabidopsis thaliana
tgttggagaccattagc

SEQ ID NO: 159320 - DNA, 17 bp, Arabidopsis thaliana
tgttggagcgatttgtc

SEQ ID NO: 159321 - DNA, 17 bp, Arabidopsis thaliana
tgttggattaatgccac

SEQ ID NO: 159322 - DNA, 17 bp, Arabidopsis thaliana
tgttggattgttgggct

SEQ ID NO: 159323 - DNA, 17 bp, Arabidopsis thaliana
tgttggatttcgtatcc

SEQ ID NO: 159324 - DNA, 17 bp, Arabidopsis thaliana
tgttggccaaatgttga

SEQ ID NO: 159325 - DNA, 17 bp, Arabidopsis thaliana
tgttggcccaatggtaa

SEQ ID NO: 159326 - DNA, 17 bp, Arabidopsis thaliana
tgttggcccagtgataa

SEQ ID NO: 159327 - DNA, 17 bp, Arabidopsis thaliana
tgttggccgtgaatcga

SEQ ID NO: 159328 - DNA, 17 bp, Arabidopsis thaliana
tgttggccgtgagtcga

SEQ ID NO: 159329 - DNA, 17 bp, Arabidopsis thaliana
tgttggccttcgggatc

SEQ ID NO: 159330 - DNA, 17 bp, Arabidopsis thaliana
tgttggcgcattgacta

SEQ ID NO: 159331 - DNA, 17 bp, Arabidopsis thaliana
tgttggctaagattcca

SEQ ID NO: 159332 - DNA, 17 bp, Arabidopsis thaliana
tgttgggagctttcgtt

SEQ ID NO: 159333 - DNA, 17 bp, Arabidopsis thaliana
tgttgggatttatttac

SEQ ID NO: 159334 - DNA, 17 bp, Arabidopsis thaliana
tgttgggcctcactgtt

SEQ ID NO: 159335 - DNA, 17 bp, Arabidopsis thaliana
tgttgggccttacaatt

SEQ ID NO: 159336 - DNA, 17 bp, Arabidopsis thaliana
tgttgggctcgatctgt

SEQ ID NO: 159337 - DNA, 17 bp, Arabidopsis thaliana
tgttgggcttaggctgt

SEQ ID NO: 159338 - DNA, 17 bp, Arabidopsis thaliana
tgttgggcttgatctgt

SEQ ID NO: 159339 - DNA, 17 bp, Arabidopsis thaliana
tgttgggcttgcttcta

SEQ ID NO: 159340 - DNA, 17 bp, Arabidopsis thaliana
tgttgggcttggactgt

SEQ ID NO: 159341 - DNA, 17 bp, Arabidopsis thaliana
tgttgggcttggattgt

SEQ ID NO: 159342 - DNA, 17 bp, Arabidopsis thaliana
tgttgggctttatttac

SEQ ID NO: 159343 - DNA, 17 bp, Arabidopsis thaliana
tgttgggtcggggctgg

SEQ ID NO: 159344 - DNA, 17 bp, Arabidopsis thaliana
tgttgggtgtcaaaccg

SEQ ID NO: 159345 - DNA, 17 bp, Arabidopsis thaliana
tgttggtaactttggtc

SEQ ID NO: 159346 - DNA, 17 bp, Arabidopsis thaliana
tgttggtcccgacccct

SEQ ID NO: 159347 - DNA, 17 bp, Arabidopsis thaliana
tgttggtcccgagggac

SEQ ID NO: 159348 - DNA, 17 bp, Arabidopsis thaliana
tgttggtcgtgttgctg

SEQ ID NO: 159349 - DNA, 17 bp, Arabidopsis thaliana
tgttggtctttagagga

SEQ ID NO: 159350 - DNA, 17 bp, Arabidopsis thaliana
tgttggtgccaagaggg

SEQ ID NO: 159351 - DNA, 17 bp, Arabidopsis thaliana
tgttggtggtctcttaa

SEQ ID NO: 159352 - DNA, 17 bp, Arabidopsis thaliana
tgttggtgtagctgaag

SEQ ID NO: 159353 - DNA, 17 bp, Arabidopsis thaliana
tgttggttaagctggat

SEQ ID NO: 159354 - DNA, 17 bp, Arabidopsis thaliana
tgttggttcagaggcat

SEQ ID NO: 159355 - DNA, 17 bp, Arabidopsis thaliana
tgttggttcagttggtt

SEQ ID NO: 159356 - DNA, 17 bp, Arabidopsis thaliana
tgttggttggtcctgaa

SEQ ID NO: 159357 - DNA, 17 bp, Arabidopsis thaliana
tgttggtttgctacatg

SEQ ID NO: 159358 - DNA, 17 bp, Arabidopsis thaliana
tgttggttttagtggtg

SEQ ID NO: 159359 - DNA, 17 bp, Arabidopsis thaliana
tgttggttttgctaggt

SEQ ID NO: 159360 - DNA, 17 bp, Arabidopsis thaliana
tgttggttttggcctct

SEQ ID NO: 159361 - DNA, 17 bp, Arabidopsis thaliana
tgttgtaatctctctca

SEQ ID NO: 159362 - DNA, 17 bp, Arabidopsis thaliana
tgttgtactttcggttc

SEQ ID NO: 159363 - DNA, 17 bp, Arabidopsis thaliana
tgttgtagacggaacgc

SEQ ID NO: 159364 - DNA, 17 bp, Arabidopsis thaliana
tgttgtagaggccaaac

SEQ ID NO: 159365 - DNA, 17 bp, Arabidopsis thaliana
tgttgtagccgccttgg

SEQ ID NO: 159366 - DNA, 17 bp, Arabidopsis thaliana
tgttgtagctgtgttgg

SEQ ID NO: 159367 - DNA, 17 bp, Arabidopsis thaliana
tgttgtaggacgtttct

SEQ ID NO: 159368 - DNA, 17 bp, Arabidopsis thaliana
tgttgtaggtgtgatga

SEQ ID NO: 159369 - DNA, 17 bp, Arabidopsis thaliana
tgttgtagttcctttct

SEQ ID NO: 159370 - DNA, 17 bp, Arabidopsis thaliana
tgttgtcaatggccttg

SEQ ID NO: 159371 - DNA, 17 bp, Arabidopsis thaliana
tgttgtcagaatatgca

SEQ ID NO: 159372 - DNA, 17 bp, Arabidopsis thaliana
tgttgtcagaatctgca

SEQ ID NO: 159373 - DNA, 17 bp, Arabidopsis thaliana
tgttgtcatgcaaagct

SEQ ID NO: 159374 - DNA, 17 bp, Arabidopsis thaliana
tgttgtccacaaagatc

SEQ ID NO: 159375 - DNA, 17 bp, Arabidopsis thaliana
tgttgtccattgatgac

SEQ ID NO: 159376 - DNA, 17 bp, Arabidopsis thaliana
tgttgtccgccgacttt

SEQ ID NO: 159377 - DNA, 17 bp, Arabidopsis thaliana
tgttgtccgcgctgtat

SEQ ID NO: 159378 - DNA, 17 bp, Arabidopsis thaliana
tgttgtcgctaagtgcg

SEQ ID NO: 159379 - DNA, 17 bp, Arabidopsis thaliana
tgttgtcgctgacgctg

SEQ ID NO: 159380 - DNA, 17 bp, Arabidopsis thaliana
tgttgtcgctggttgct

SEQ ID NO: 159381 - DNA, 17 bp, Arabidopsis thaliana
tgttgtcgtcggtgatg

SEQ ID NO: 159382 - DNA, 17 bp, Arabidopsis thaliana
tgttgtctaagacttgt

SEQ ID NO: 159383 - DNA, 17 bp, Arabidopsis thaliana
tgttgtgaaattgccgt

SEQ ID NO: 159384 - DNA, 17 bp, Arabidopsis thaliana
tgttgtgaatgctacga

SEQ ID NO: 159385 - DNA, 17 bp, Arabidopsis thaliana
tgttgtgacaccgattc

SEQ ID NO: 159386 - DNA, 17 bp, Arabidopsis thaliana
tgttgtgacttgtgagc

SEQ ID NO: 159387 - DNA, 17 bp, Arabidopsis thaliana
tgttgtgagtacggaca

SEQ ID NO: 159388 - DNA, 17 bp, Arabidopsis thaliana
tgttgtgatacgatttt

SEQ ID NO: 159389 - DNA, 17 bp, Arabidopsis thaliana
tgttgtgccgactcgga

SEQ ID NO: 159390 - DNA, 17 bp, Arabidopsis thaliana
tgttgtgctgagtctta

SEQ ID NO: 159391 - DNA, 17 bp, Arabidopsis thaliana
tgttgtgctgctcagat

SEQ ID NO: 159392 - DNA, 17 bp, Arabidopsis thaliana
tgttgtgcttctttttt

SEQ ID NO: 159393 - DNA, 17 bp, Arabidopsis thaliana
tgttgtgctttaaacta

SEQ ID NO: 159394 - DNA, 17 bp, Arabidopsis thaliana
tgttgtggactgggctt

SEQ ID NO: 159395 - DNA, 17 bp, Arabidopsis thaliana
tgttgtggcggcgatat

SEQ ID NO: 159396 - DNA, 17 bp, Arabidopsis thaliana
tgttgtggcggcgatct

SEQ ID NO: 159397 - DNA, 17 bp, Arabidopsis thaliana
tgttgtggctatccacc

SEQ ID NO: 159398 - DNA, 17 bp, Arabidopsis thaliana
tgttgtggctgagtaaa

SEQ ID NO: 159399 - DNA, 17 bp, Arabidopsis thaliana
tgttgtggtcctacggg

SEQ ID NO: 159400 - DNA, 17 bp, Arabidopsis thaliana
tgttgtggttctgtctt

SEQ ID NO: 159401 - DNA, 17 bp, Arabidopsis thaliana
tgttgtgtccaagtcca

SEQ ID NO: 159402 - DNA, 17 bp, Arabidopsis thaliana
tgttgtgtccgacttgt

SEQ ID NO: 159403 - DNA, 17 bp, Arabidopsis thaliana
tgttgtgtctcgcgtct

SEQ ID NO: 159404 - DNA, 17 bp, Arabidopsis thaliana
tgttgtgtctctctacg

SEQ ID NO: 159405 - DNA, 17 bp, Arabidopsis thaliana
tgttgttaactggatcg

SEQ ID NO: 159406 - DNA, 17 bp, Arabidopsis thaliana
tgttgttagaaacgcgt

SEQ ID NO: 159407 - DNA, 17 bp, Arabidopsis thaliana
tgttgttatggaggtga

SEQ ID NO: 159408 - DNA, 17 bp, Arabidopsis thaliana
tgttgttcacgccatag

SEQ ID NO: 159409 - DNA, 17 bp, Arabidopsis thaliana
tgttgttccatggtgtt

SEQ ID NO: 159410 - DNA, 17 bp, Arabidopsis thaliana
tgttgttcgcagagctg

SEQ ID NO: 159411 - DNA, 17 bp, Arabidopsis thaliana
tgttgttcggagtcata

SEQ ID NO: 159412 - DNA, 17 bp, Arabidopsis thaliana
tgttgttcggagtcatg

SEQ ID NO: 159413 - DNA, 17 bp, Arabidopsis thaliana
tgttgttcggatgttcc

SEQ ID NO: 159414 - DNA, 17 bp, Arabidopsis thaliana
tgttgttcgtttattgg

SEQ ID NO: 159415 - DNA, 17 bp, Arabidopsis thaliana
tgttgttcgtttgactg

SEQ ID NO: 159416 - DNA, 17 bp, Arabidopsis thaliana
tgttgttcgtttgctta

SEQ ID NO: 159417 - DNA, 17 bp, Arabidopsis thaliana
tgttgttctccttcttc

SEQ ID NO: 159418 - DNA, 17 bp, Arabidopsis thaliana
tgttgttctcgtaagct

SEQ ID NO: 159419 - DNA, 17 bp, Arabidopsis thaliana
tgttgttctcgtcagct

SEQ ID NO: 159420 - DNA, 17 bp, Arabidopsis thaliana
tgttgttcttcttcttc

SEQ ID NO: 159421 - DNA, 17 bp, Arabidopsis thaliana
tgttgttcttttgaccg

SEQ ID NO: 159422 - DNA, 17 bp, Arabidopsis thaliana
tgttgttcttttgacgg

SEQ ID NO: 159423 - DNA, 17 bp, Arabidopsis thaliana
tgttgttcttttgactg

SEQ ID NO: 159424 - DNA, 17 bp, Arabidopsis thaliana
tgttgttgacagccaca

SEQ ID NO: 159425 - DNA, 17 bp, Arabidopsis thaliana
tgttgttgacggtgact

SEQ ID NO: 159426 - DNA, 17 bp, Arabidopsis thaliana
tgttgttgagagtgatt

SEQ ID NO: 159427 - DNA, 17 bp, Arabidopsis thaliana
tgttgttgcgaccatga

SEQ ID NO: 159428 - DNA, 17 bp, Arabidopsis thaliana
tgttgttggacacgtcg

SEQ ID NO: 159429 - DNA, 17 bp, Arabidopsis thaliana
tgttgttgtctgagagg

SEQ ID NO: 159430 - DNA, 17 bp, Arabidopsis thaliana
tgttgttgtgtgtcggc

SEQ ID NO: 159431 - DNA, 17 bp, Arabidopsis thaliana
tgttgttgttcttcttc

SEQ ID NO: 159432 - DNA, 17 bp, Arabidopsis thaliana
tgttgtttctcggattt

SEQ ID NO: 159433 - DNA, 17 bp, Arabidopsis thaliana
tgttgtttctgtgagct

SEQ ID NO: 159434 - DNA, 17 bp, Arabidopsis thaliana
tgttgtttggttccact

SEQ ID NO: 159435 - DNA, 17 bp, Arabidopsis thaliana
tgttgttttctgcggga

SEQ ID NO: 159436 - DNA, 17 bp, Arabidopsis thaliana
tgttgttttggcgggaa

SEQ ID NO: 159437 - DNA, 17 bp, Arabidopsis thaliana
tgttgttttggtttcag

SEQ ID NO: 159438 - DNA, 17 bp, Arabidopsis thaliana
tgttgttttggttttag

SEQ ID NO: 159439 - DNA, 17 bp, Arabidopsis thaliana
tgtttaacagcctgccc

SEQ ID NO: 159440 - DNA, 17 bp, Arabidopsis thaliana
tgtttaccagtttgttc

SEQ ID NO: 159441 - DNA, 17 bp, Arabidopsis thaliana
tgtttaccattgcgttg

SEQ ID NO: 159442 - DNA, 17 bp, Arabidopsis thaliana
tgtttaccgtaatgccg

SEQ ID NO: 159443 - DNA, 17 bp, Arabidopsis thaliana
tgtttacggaacgcgct

SEQ ID NO: 159444 - DNA, 17 bp, Arabidopsis thaliana
tgtttacggcgtttagg

SEQ ID NO: 159445 - DNA, 17 bp, Arabidopsis thaliana
tgtttactgtaccgcga

SEQ ID NO: 159446 - DNA, 17 bp, Arabidopsis thaliana
tgtttatcttctggacg

SEQ ID NO: 159447 - DNA, 17 bp, Arabidopsis thaliana
tgtttcaaaagcgacca

SEQ ID NO: 159448 - DNA, 17 bp, Arabidopsis thaliana
tgtttcaaacgcctgac

SEQ ID NO: 159449 - DNA, 17 bp, Arabidopsis thaliana
tgtttcaaaggcagcgt

SEQ ID NO: 159450 - DNA, 17 bp, Arabidopsis thaliana
tgtttcaaatgcctgac

SEQ ID NO: 159451 - DNA, 17 bp, Arabidopsis thaliana
tgtttcaactggctcac

SEQ ID NO: 159452 - DNA, 17 bp, Arabidopsis thaliana
tgtttcaagacgggtcg

SEQ ID NO: 159453 - DNA, 17 bp, Arabidopsis thaliana
tgtttcaatacgaagct

SEQ ID NO: 159454 - DNA, 17 bp, Arabidopsis thaliana
tgtttcaattctgggac

SEQ ID NO: 159455 - DNA, 17 bp, Arabidopsis thaliana
tgtttcaattgcagcta

SEQ ID NO: 159456 - DNA, 17 bp, Arabidopsis thaliana
tgtttcaattttggggc

SEQ ID NO: 159457 - DNA, 17 bp, Arabidopsis thaliana
tgtttcacagacgcgca

SEQ ID NO: 159458 - DNA, 17 bp, Arabidopsis thaliana
tgtttcacggatcatgc

SEQ ID NO: 159459 - DNA, 17 bp, Arabidopsis thaliana
tgtttcacgttgacgcg

SEQ ID NO: 159460 - DNA, 17 bp, Arabidopsis thaliana
tgtttcactttgagaag

SEQ ID NO: 159461 - DNA, 17 bp, Arabidopsis thaliana
tgtttcactttgaggag

SEQ ID NO: 159462 - DNA, 17 bp, Arabidopsis thaliana
tgtttcactttgttgtg

SEQ ID NO: 159463 - DNA, 17 bp, Arabidopsis thaliana
tgtttcagagaggatcg

SEQ ID NO: 159464 - DNA, 17 bp, Arabidopsis thaliana
tgtttcagattggactt

SEQ ID NO: 159465 - DNA, 17 bp, Arabidopsis thaliana
tgtttcagtgcggtttt

SEQ ID NO: 159466 - DNA, 17 bp, Arabidopsis thaliana
tgtttcagtgcttggat

SEQ ID NO: 159467 - DNA, 17 bp, Arabidopsis thaliana
tgtttcatgcggtttgt

SEQ ID NO: 159468 - DNA, 17 bp, Arabidopsis thaliana
tgtttcattctgggtct

SEQ ID NO: 159469 - DNA, 17 bp, Arabidopsis thaliana
tgtttcattttttttga

SEQ ID NO: 159470 - DNA, 17 bp, Arabidopsis thaliana
tgtttcatttttttttt

SEQ ID NO: 159471 - DNA, 17 bp, Arabidopsis thaliana
tgtttccaaaacagcct

SEQ ID NO: 159472 - DNA, 17 bp, Arabidopsis thaliana
tgtttccacggtgtgcc

SEQ ID NO: 159473 - DNA, 17 bp, Arabidopsis thaliana
tgtttccactatctttg

SEQ ID NO: 159474 - DNA, 17 bp, Arabidopsis thaliana
tgtttccagtggcagac

SEQ ID NO: 159475 - DNA, 17 bp, Arabidopsis thaliana
tgtttccagtggcgggc

SEQ ID NO: 159476 - DNA, 17 bp, Arabidopsis thaliana
tgtttcccattggaccg

SEQ ID NO: 159477 - DNA, 17 bp, Arabidopsis thaliana
tgtttcccggctggtgc

SEQ ID NO: 159478 - DNA, 17 bp, Arabidopsis thaliana
tgtttccctggatgcgc

SEQ ID NO: 159479 - DNA, 17 bp, Arabidopsis thaliana
tgtttcccttcgcaact

SEQ ID NO: 159480 - DNA, 17 bp, Arabidopsis thaliana
tgtttcccttgcacccc

SEQ ID NO: 159481 - DNA, 17 bp, Arabidopsis thaliana
tgtttcccttggaccac

SEQ ID NO: 159482 - DNA, 17 bp, Arabidopsis thaliana
tgtttccgaggtttact

SEQ ID NO: 159483 - DNA, 17 bp, Arabidopsis thaliana
tgtttccgcttatgtat

SEQ ID NO: 159484 - DNA, 17 bp, Arabidopsis thaliana
tgtttccgtggcagttt

SEQ ID NO: 159485 - DNA, 17 bp, Arabidopsis thaliana
tgtttccttgttctgct

SEQ ID NO: 159486 - DNA, 17 bp, Arabidopsis thaliana
tgtttcgaacatgatct

SEQ ID NO: 159487 - DNA, 17 bp, Arabidopsis thaliana
tgtttcgagaatagcgt

SEQ ID NO: 159488 - DNA, 17 bp, Arabidopsis thaliana
tgtttcgccgccgcaga

SEQ ID NO: 159489 - DNA, 17 bp, Arabidopsis thaliana
tgtttcgcttctctcag

SEQ ID NO: 159490 - DNA, 17 bp, Arabidopsis thaliana
tgtttcggaactgcact

SEQ ID NO: 159491 - DNA, 17 bp, Arabidopsis thaliana
tgtttcggatttctgtc

SEQ ID NO: 159492 - DNA, 17 bp, Arabidopsis thaliana
tgtttcggccaatggag

SEQ ID NO: 159493 - DNA, 17 bp, Arabidopsis thaliana
tgtttcgggcattttcg

SEQ ID NO: 159494 - DNA, 17 bp, Arabidopsis thaliana
tgtttcgggtcataacg

SEQ ID NO: 159495 - DNA, 17 bp, Arabidopsis thaliana
tgtttcggtcttttccg

SEQ ID NO: 159496 - DNA, 17 bp, Arabidopsis thaliana
tgtttcggtgcgggccg

SEQ ID NO: 159497 - DNA, 17 bp, Arabidopsis thaliana
tgtttcggtgcgggcgg

SEQ ID NO: 159498 - DNA, 17 bp, Arabidopsis thaliana
tgtttcggttttgtttc

SEQ ID NO: 159499 - DNA, 17 bp, Arabidopsis thaliana
tgtttcgtctcttttcc

SEQ ID NO: 159500 - DNA, 17 bp, Arabidopsis thaliana
tgtttcgtcttgtcggc

SEQ ID NO: 159501 - DNA, 17 bp, Arabidopsis thaliana
tgtttcgtgttgatgac

SEQ ID NO: 159502 - DNA, 17 bp, Arabidopsis thaliana
tgtttcgtgttgatgag

SEQ ID NO: 159503 - DNA, 17 bp, Arabidopsis thaliana
tgtttcgtgttgatggc

SEQ ID NO: 159504 - DNA, 17 bp, Arabidopsis thaliana
tgtttcgttcaacgtcg

SEQ ID NO: 159505 - DNA, 17 bp, Arabidopsis thaliana
tgtttcgttctaggact

SEQ ID NO: 159506 - DNA, 17 bp, Arabidopsis thaliana
tgtttctaccgttgtaa

SEQ ID NO: 159507 - DNA, 17 bp, Arabidopsis thaliana
tgtttctacttgggaga

SEQ ID NO: 159508 - DNA, 17 bp, Arabidopsis thaliana
tgtttctatccaccaac

SEQ ID NO: 159509 - DNA, 17 bp, Arabidopsis thaliana
tgtttctcattggaccg

SEQ ID NO: 159510 - DNA, 17 bp, Arabidopsis thaliana
tgtttctgagatcaccc

SEQ ID NO: 159511 - DNA, 17 bp, Arabidopsis thaliana
tgtttctgcagtgtacc

SEQ ID NO: 159512 - DNA, 17 bp, Arabidopsis thaliana
tgtttctgcgatgggta

SEQ ID NO: 159513 - DNA, 17 bp, Arabidopsis thaliana
tgtttctgcgatgtgtt

SEQ ID NO: 159514 - DNA, 17 bp, Arabidopsis thaliana
tgtttctggccacgtat

SEQ ID NO: 159515 - DNA, 17 bp, Arabidopsis thaliana
tgtttctgggaatccgg

SEQ ID NO: 159516 - DNA, 17 bp, Arabidopsis thaliana
tgtttctggtaaaggtg

SEQ ID NO: 159517 - DNA, 17 bp, Arabidopsis thaliana
tgtttctgtttggcttt

SEQ ID NO: 159518 - DNA, 17 bp, Arabidopsis thaliana
tgtttcttgaatgcgta

SEQ ID NO: 159519 - DNA, 17 bp, Arabidopsis thaliana
tgtttcttgcgctcgta

SEQ ID NO: 159520 - DNA, 17 bp, Arabidopsis thaliana
tgtttcttggggatgaa

SEQ ID NO: 159521 - DNA, 17 bp, Arabidopsis thaliana
tgtttctttctgtgctg

SEQ ID NO: 159522 - DNA, 17 bp, Arabidopsis thaliana
tgtttctttgatctgct

SEQ ID NO: 159523 - DNA, 17 bp, Arabidopsis thaliana
tgtttcttttggtccgg

SEQ ID NO: 159524 - DNA, 17 bp, Arabidopsis thaliana
tgtttgaaaaccatttg

SEQ ID NO: 159525 - DNA, 17 bp, Arabidopsis thaliana
tgtttgacacgccttct

SEQ ID NO: 159526 - DNA, 17 bp, Arabidopsis thaliana
tgtttgacgcgtgtgag

SEQ ID NO: 159527 - DNA, 17 bp, Arabidopsis thaliana
tgtttgagaccagtgcc

SEQ ID NO: 159528 - DNA, 17 bp, Arabidopsis thaliana
tgtttgagacgggactc

SEQ ID NO: 159529 - DNA, 17 bp, Arabidopsis thaliana
tgtttgagccgacaaga

SEQ ID NO: 159530 - DNA, 17 bp, Arabidopsis thaliana
tgtttgagccgtgtcaa

SEQ ID NO: 159531 - DNA, 17 bp, Arabidopsis thaliana
tgtttgagtatgaccgg

SEQ ID NO: 159532 - DNA, 17 bp, Arabidopsis thaliana
tgtttgatcgccgtcgt

SEQ ID NO: 159533 - DNA, 17 bp, Arabidopsis thaliana
tgtttgatctacgctca

SEQ ID NO: 159534 - DNA, 17 bp, Arabidopsis thaliana
tgtttgatgagacccag

SEQ ID NO: 159535 - DNA, 17 bp, Arabidopsis thaliana
tgtttgatggaatgcca

SEQ ID NO: 159536 - DNA, 17 bp, Arabidopsis thaliana
tgtttgatttgtacacc

SEQ ID NO: 159537 - DNA, 17 bp, Arabidopsis thaliana
tgtttgcaccggcgttc

SEQ ID NO: 159538 - DNA, 17 bp, Arabidopsis thaliana
tgtttgcatgtcgctgg

SEQ ID NO: 159539 - DNA, 17 bp, Arabidopsis thaliana
tgtttgcccgcgcagga

SEQ ID NO: 159540 - DNA, 17 bp, Arabidopsis thaliana
tgtttgccgtccggttt

SEQ ID NO: 159541 - DNA, 17 bp, Arabidopsis thaliana
tgtttgcggatgataag

SEQ ID NO: 159542 - DNA, 17 bp, Arabidopsis thaliana
tgtttgcggttgcgaac

SEQ ID NO: 159543 - DNA, 17 bp, Arabidopsis thaliana
tgtttgcgtcggcacca

SEQ ID NO: 159544 - DNA, 17 bp, Arabidopsis thaliana
tgtttgcgtttggtacg

SEQ ID NO: 159545 - DNA, 17 bp, Arabidopsis thaliana
tgtttgctatagaatgg

SEQ ID NO: 159546 - DNA, 17 bp, Arabidopsis thaliana
tgtttgctcagaatgct

SEQ ID NO: 159547 - DNA, 17 bp, Arabidopsis thaliana
tgtttgctccgacccgt

SEQ ID NO: 159548 - DNA, 17 bp, Arabidopsis thaliana
tgtttggaagttttccg

SEQ ID NO: 159549 - DNA, 17 bp, Arabidopsis thaliana
tgtttggaatgcagccc

SEQ ID NO: 159550 - DNA, 17 bp, Arabidopsis thaliana
tgtttggacctacgatc

SEQ ID NO: 159551 - DNA, 17 bp, Arabidopsis thaliana
tgtttggagaatcctca

SEQ ID NO: 159552 - DNA, 17 bp, Arabidopsis thaliana
tgtttggagacccgtta

SEQ ID NO: 159553 - DNA, 17 bp, Arabidopsis thaliana
tgtttggcccggtcaac

SEQ ID NO: 159554 - DNA, 17 bp, Arabidopsis thaliana
tgtttggccgttttcag

SEQ ID NO: 159555 - DNA, 17 bp, Arabidopsis thaliana
tgtttggctccctgtat

SEQ ID NO: 159556 - DNA, 17 bp, Arabidopsis thaliana
tgtttgggaatgcagcc

SEQ ID NO: 159557 - DNA, 17 bp, Arabidopsis thaliana
tgtttggtcccaaggct

SEQ ID NO: 159558 - DNA, 17 bp, Arabidopsis thaliana
tgtttggtctagtggta

SEQ ID NO: 159559 - DNA, 17 bp, Arabidopsis thaliana
tgtttggtgacctgcga

SEQ ID NO: 159560 - DNA, 17 bp, Arabidopsis thaliana
tgtttggtgactgattt

SEQ ID NO: 159561 - DNA, 17 bp, Arabidopsis thaliana
tgtttggttgccgcaac

SEQ ID NO: 159562 - DNA, 17 bp, Arabidopsis thaliana
tgtttggtttgcaactt

SEQ ID NO: 159563 - DNA, 17 bp, Arabidopsis thaliana
tgtttgtaactgcctgt

SEQ ID NO: 159564 - DNA, 17 bp, Arabidopsis thaliana
tgtttgtacatctcgct

SEQ ID NO: 159565 - DNA, 17 bp, Arabidopsis thaliana
tgtttgtagggttttac

SEQ ID NO: 159566 - DNA, 17 bp, Arabidopsis thaliana
tgtttgtagtaggtgac

SEQ ID NO: 159567 - DNA, 17 bp, Arabidopsis thaliana
tgtttgtatgaaaccag

SEQ ID NO: 159568 - DNA, 17 bp, Arabidopsis thaliana
tgtttgtattctccggg

SEQ ID NO: 159569 - DNA, 17 bp, Arabidopsis thaliana
tgtttgtcacatttctg

SEQ ID NO: 159570 - DNA, 17 bp, Arabidopsis thaliana
tgtttgtcagttgtcag

SEQ ID NO: 159571 - DNA, 17 bp, Arabidopsis thaliana
tgtttgtcttggacgcg

SEQ ID NO: 159572 - DNA, 17 bp, Arabidopsis thaliana
tgtttgtctttggttgc

SEQ ID NO: 159573 - DNA, 17 bp, Arabidopsis thaliana
tgtttgtgcgatctcgg

SEQ ID NO: 159574 - DNA, 17 bp, Arabidopsis thaliana
tgtttgtgggagaccgt

SEQ ID NO: 159575 - DNA, 17 bp, Arabidopsis thaliana
tgtttgtgttgtgtgaa

SEQ ID NO: 159576 - DNA, 17 bp, Arabidopsis thaliana
tgtttgttcttctctgg

SEQ ID NO: 159577 - DNA, 17 bp, Arabidopsis thaliana
tgtttgttgagctggat

SEQ ID NO: 159578 - DNA, 17 bp, Arabidopsis thaliana
tgttttaagacgttgag

SEQ ID NO: 159579 - DNA, 17 bp, Arabidopsis thaliana
tgttttacttatgcgca

SEQ ID NO: 159580 - DNA, 17 bp, Arabidopsis thaliana
tgttttatgcttgcttt

SEQ ID NO: 159581 - DNA, 17 bp, Arabidopsis thaliana
tgttttattggctgcac

SEQ ID NO: 159582 - DNA, 17 bp, Arabidopsis thaliana
tgttttattttcaggga

SEQ ID NO: 159583 - DNA, 17 bp, Arabidopsis thaliana
tgttttcaacgtcccac

SEQ ID NO: 159584 - DNA, 17 bp, Arabidopsis thaliana
tgttttcactttcaaat

SEQ ID NO: 159585 - DNA, 17 bp, Arabidopsis thaliana
tgttttcagccagccta

SEQ ID NO: 159586 - DNA, 17 bp, Arabidopsis thaliana
tgttttcagcttcgggg

SEQ ID NO: 159587 - DNA, 17 bp, Arabidopsis thaliana
tgttttcagtgatgaga

SEQ ID NO: 159588 - DNA, 17 bp, Arabidopsis thaliana
tgttttcattctccagc

SEQ ID NO: 159589 - DNA, 17 bp, Arabidopsis thaliana
tgttttccagcttttct

SEQ ID NO: 159590 - DNA, 17 bp, Arabidopsis thaliana
tgttttccaggctcaga

SEQ ID NO: 159591 - DNA, 17 bp, Arabidopsis thaliana
tgttttccgactaatgc

SEQ ID NO: 159592 - DNA, 17 bp, Arabidopsis thaliana
tgttttccgcctaatgt

SEQ ID NO: 159593 - DNA, 17 bp, Arabidopsis thaliana
tgttttcgctgaaccaa

SEQ ID NO: 159594 - DNA, 17 bp, Arabidopsis thaliana
tgttttcggaatccgtt

SEQ ID NO: 159595 - DNA, 17 bp, Arabidopsis thaliana
tgttttcgtggacatgt

SEQ ID NO: 159596 - DNA, 17 bp, Arabidopsis thaliana
tgttttcgtgtgaccgg

SEQ ID NO: 159597 - DNA, 17 bp, Arabidopsis thaliana
tgttttcgttctgacac

SEQ ID NO: 159598 - DNA, 17 bp, Arabidopsis thaliana
tgttttctactcgacca

SEQ ID NO: 159599 - DNA, 17 bp, Arabidopsis thaliana
tgttttctatgcggcgc

SEQ ID NO: 159600 - DNA, 17 bp, Arabidopsis thaliana
tgttttctcagttcgtg

SEQ ID NO: 159601 - DNA, 17 bp, Arabidopsis thaliana
tgttttctgggattcgc

SEQ ID NO: 159602 - DNA, 17 bp, Arabidopsis thaliana
tgttttcttctgtgatt

SEQ ID NO: 159603 - DNA, 17 bp, Arabidopsis thaliana
tgttttctttgggtcta

SEQ ID NO: 159604 - DNA, 17 bp, Arabidopsis thaliana
tgttttgaactggttgt

SEQ ID NO: 159605 - DNA, 17 bp, Arabidopsis thaliana
tgttttgaatgcgatgc

SEQ ID NO: 159606 - DNA, 17 bp, Arabidopsis thaliana
tgttttgacgtgggagc

SEQ ID NO: 159607 - DNA, 17 bp, Arabidopsis thaliana
tgttttgacttcagacg

SEQ ID NO: 159608 - DNA, 17 bp, Arabidopsis thaliana
tgttttgattgcgcaag

SEQ ID NO: 159609 - DNA, 17 bp, Arabidopsis thaliana
tgttttgatttggttcc

SEQ ID NO: 159610 - DNA, 17 bp, Arabidopsis thaliana
tgttttgccaaggatgt

SEQ ID NO: 159611 - DNA, 17 bp, Arabidopsis thaliana
tgttttgcgaccgaggg

SEQ ID NO: 159612 - DNA, 17 bp, Arabidopsis thaliana
tgttttgctaagagatc

SEQ ID NO: 159613 - DNA, 17 bp, Arabidopsis thaliana
tgttttgctacacaaga

SEQ ID NO: 159614 - DNA, 17 bp, Arabidopsis thaliana
tgttttgctgtcgacca

SEQ ID NO: 159615 - DNA, 17 bp, Arabidopsis thaliana
tgttttggaaatccgct

SEQ ID NO: 159616 - DNA, 17 bp, Arabidopsis thaliana
tgttttggaatgcgttt

SEQ ID NO: 159617 - DNA, 17 bp, Arabidopsis thaliana
tgttttggtatgcgttt

SEQ ID NO: 159618 - DNA, 17 bp, Arabidopsis thaliana
tgttttggtcccaaggc

SEQ ID NO: 159619 - DNA, 17 bp, Arabidopsis thaliana
tgttttggtccgtttct

SEQ ID NO: 159620 - DNA, 17 bp, Arabidopsis thaliana
tgttttgtaacggctgt

SEQ ID NO: 159621 - DNA, 17 bp, Arabidopsis thaliana
tgttttgtcctcattcg

SEQ ID NO: 159622 - DNA, 17 bp, Arabidopsis thaliana
tgttttgtgcttgaatc

SEQ ID NO: 159623 - DNA, 17 bp, Arabidopsis thaliana
tgttttgttgttgtagg

SEQ ID NO: 159624 - DNA, 17 bp, Arabidopsis thaliana
tgttttgtttgactttg

SEQ ID NO: 159625 - DNA, 17 bp, Arabidopsis thaliana
tgtttttactctgctgc

SEQ ID NO: 159626 - DNA, 17 bp, Arabidopsis thaliana
tgtttttagccgttcga

SEQ ID NO: 159627 - DNA, 17 bp, Arabidopsis thaliana
tgtttttccatccagat

SEQ ID NO: 159628 - DNA, 17 bp, Arabidopsis thaliana
tgtttttccgcgatgat

SEQ ID NO: 159629 - DNA, 17 bp, Arabidopsis thaliana
tgtttttcctggatcgg

SEQ ID NO: 159630 - DNA, 17 bp, Arabidopsis thaliana
tgtttttcgctaggttt

SEQ ID NO: 159631 - DNA, 17 bp, Arabidopsis thaliana
tgtttttcgttggaccg

SEQ ID NO: 159632 - DNA, 17 bp, Arabidopsis thaliana
tgtttttgcctcagaga

SEQ ID NO: 159633 - DNA, 17 bp, Arabidopsis thaliana
tgtttttgcggtttaaa

SEQ ID NO: 159634 - DNA, 17 bp, Arabidopsis thaliana
tgtttttggatttgctt

SEQ ID NO: 159635 - DNA, 17 bp, Arabidopsis thaliana
tgtttttggcttgaacc

SEQ ID NO: 159636 - DNA, 17 bp, Arabidopsis thaliana
tgtttttggtcccaagg

SEQ ID NO: 159637 - DNA, 17 bp, Arabidopsis thaliana
tgtttttggtggtggag

SEQ ID NO: 159638 - DNA, 17 bp, Arabidopsis thaliana
tgtttttgtcaaatgtg

SEQ ID NO: 159639 - DNA, 17 bp, Arabidopsis thaliana
tgtttttgttccctcct

SEQ ID NO: 159640 - DNA, 17 bp, Arabidopsis thaliana
tgttttttgtagtgcgg

SEQ ID NO: 159641 - DNA, 17 bp, Arabidopsis thaliana
tgtttttttgcttaaga

SEQ ID NO: 159642 - DNA, 17 bp, Arabidopsis thaliana
tgtttttttggtcgctg

SEQ ID NO: 159643 - DNA, 17 bp, Arabidopsis thaliana
ttaaaaaatctgttgag

SEQ ID NO: 159644 - DNA, 17 bp, Arabidopsis thaliana
ttaaaaacgttggaccg

SEQ ID NO: 159645 - DNA, 17 bp, Arabidopsis thaliana
ttaaaaagttccggtgg

SEQ ID NO: 159646 - DNA, 17 bp, Arabidopsis thaliana
ttaaaacaaagcattgc

SEQ ID NO: 159647 - DNA, 17 bp, Arabidopsis thaliana
ttaaaacatccacaagg

SEQ ID NO: 159648 - DNA, 17 bp, Arabidopsis thaliana
ttaaaacccacacccgg

SEQ ID NO: 159649 - DNA, 17 bp, Arabidopsis thaliana
ttaaaaccgaccgctgg

SEQ ID NO: 159650 - DNA, 17 bp, Arabidopsis thaliana
ttaaaaccgattcaact

SEQ ID NO: 159651 - DNA, 17 bp, Arabidopsis thaliana
ttaaaacctttccattt

SEQ ID NO: 159652 - DNA, 17 bp, Arabidopsis thaliana
ttaaaactgatacttcc

SEQ ID NO: 159653 - DNA, 17 bp, Arabidopsis thaliana
ttaaaacttttgtgaac

SEQ ID NO: 159654 - DNA, 17 bp, Arabidopsis thaliana
ttaaaagataacgcagg

SEQ ID NO: 159655 - DNA, 17 bp, Arabidopsis thaliana
ttaaaagccacggaagc

SEQ ID NO: 159656 - DNA, 17 bp, Arabidopsis thaliana
ttaaaagtgtctacatc

SEQ ID NO: 159657 - DNA, 17 bp, Arabidopsis thaliana
ttaaaagttaacgcagg

SEQ ID NO: 159658 - DNA, 17 bp, Arabidopsis thaliana
ttaaaagtttcaggcgt

SEQ ID NO: 159659 - DNA, 17 bp, Arabidopsis thaliana
ttaaaatcaacaggagc

SEQ ID NO: 159660 - DNA, 17 bp, Arabidopsis thaliana
ttaaaatccagcggcag

SEQ ID NO: 159661 - DNA, 17 bp, Arabidopsis thaliana
ttaaaatccagtgacag

SEQ ID NO: 159662 - DNA, 17 bp, Arabidopsis thaliana
ttaaaatccagtggcag

SEQ ID NO: 159663 - DNA, 17 bp, Arabidopsis thaliana
ttaaaatcgctgcgata

SEQ ID NO: 159664 - DNA, 17 bp, Arabidopsis thaliana
ttaaaatgtgctgacct

SEQ ID NO: 159665 - DNA, 17 bp, Arabidopsis thaliana
ttaaaattccggaaccg

SEQ ID NO: 159666 - DNA, 17 bp, Arabidopsis thaliana
ttaaaattcggttcggg

SEQ ID NO: 159667 - DNA, 17 bp, Arabidopsis thaliana
ttaaacaaaaccggagt

SEQ ID NO: 159668 - DNA, 17 bp, Arabidopsis thaliana
ttaaacacaagccgcac

SEQ ID NO: 159669 - DNA, 17 bp, Arabidopsis thaliana
ttaaacagcgcattaaa

SEQ ID NO: 159670 - DNA, 17 bp, Arabidopsis thaliana
ttaaacatcactagatt

SEQ ID NO: 159671 - DNA, 17 bp, Arabidopsis thaliana
ttaaaccacgagtttgg

SEQ ID NO: 159672 - DNA, 17 bp, Arabidopsis thaliana
ttaaaccacggtctatg

SEQ ID NO: 159673 - DNA, 17 bp, Arabidopsis thaliana
ttaaaccactgacgaaa

SEQ ID NO: 159674 - DNA, 17 bp, Arabidopsis thaliana
ttaaaccactgacgaga

SEQ ID NO: 159675 - DNA, 17 bp, Arabidopsis thaliana
ttaaacccatgattttc

SEQ ID NO: 159676 - DNA, 17 bp, Arabidopsis thaliana
ttaaaccgcaacccgat

SEQ ID NO: 159677 - DNA, 17 bp, Arabidopsis thaliana
ttaaaccgcaaccgcat

SEQ ID NO: 159678 - DNA, 17 bp, Arabidopsis thaliana
ttaaaccgctggtaagt

SEQ ID NO: 159679 - DNA, 17 bp, Arabidopsis thaliana
ttaaaccgctggtaatt

SEQ ID NO: 159680 - DNA, 17 bp, Arabidopsis thaliana
ttaaaccgctttgtccg

SEQ ID NO: 159681 - DNA, 17 bp, Arabidopsis thaliana
ttaaaccggttaccgag

SEQ ID NO: 159682 - DNA, 17 bp, Arabidopsis thaliana
ttaaaccggttcactgc

SEQ ID NO: 159683 - DNA, 17 bp, Arabidopsis thaliana
ttaaaccgttaatgtag

SEQ ID NO: 159684 - DNA, 17 bp, Arabidopsis thaliana
ttaaacgagagcgctta

SEQ ID NO: 159685 - DNA, 17 bp, Arabidopsis thaliana
ttaaacgaggaaaggct

SEQ ID NO: 159686 - DNA, 17 bp, Arabidopsis thaliana
ttaaacgcaccggtatt

SEQ ID NO: 159687 - DNA, 17 bp, Arabidopsis thaliana
ttaaacggacggtgccg

SEQ ID NO: 159688 - DNA, 17 bp, Arabidopsis thaliana
ttaaacgtctgaagatc

SEQ ID NO: 159689 - DNA, 17 bp, Arabidopsis thaliana
ttaaactaagggcttga

SEQ ID NO: 159690 - DNA, 17 bp, Arabidopsis thaliana
ttaaactaagtccgcat

SEQ ID NO: 159691 - DNA, 17 bp, Arabidopsis thaliana
ttaaactcaaactcgac

SEQ ID NO: 159692 - DNA, 17 bp, Arabidopsis thaliana
ttaaactcgaatctgat

SEQ ID NO: 159693 - DNA, 17 bp, Arabidopsis thaliana
ttaaactctactgcggt

SEQ ID NO: 159694 - DNA, 17 bp, Arabidopsis thaliana
ttaaactctctcaggca

SEQ ID NO: 159695 - DNA, 17 bp, Arabidopsis thaliana
ttaaactctgcattagg

SEQ ID NO: 159696 - DNA, 17 bp, Arabidopsis thaliana
ttaaactctttcgggat

SEQ ID NO: 159697 - DNA, 17 bp, Arabidopsis thaliana
ttaaactgcgaatggct

SEQ ID NO: 159698 - DNA, 17 bp, Arabidopsis thaliana
ttaaactggtattgtcg

SEQ ID NO: 159699 - DNA, 17 bp, Arabidopsis thaliana
ttaaactggttgatcgg

SEQ ID NO: 159700 - DNA, 17 bp, Arabidopsis thaliana
ttaaacttgaccaagcg

SEQ ID NO: 159701 - DNA, 17 bp, Arabidopsis thaliana
ttaaacttgtgttgacc

SEQ ID NO: 159702 - DNA, 17 bp, Arabidopsis thaliana
ttaaacttttttctggg

SEQ ID NO: 159703 - DNA, 17 bp, Arabidopsis thaliana
ttaaagaccgttcgtcc

SEQ ID NO: 159704 - DNA, 17 bp, Arabidopsis thaliana
ttaaagacgaatcggat

SEQ ID NO: 159705 - DNA, 17 bp, Arabidopsis thaliana
ttaaagacggtccacag

SEQ ID NO: 159706 - DNA, 17 bp, Arabidopsis thaliana
ttaaagccaaatcaggt

SEQ ID NO: 159707 - DNA, 17 bp, Arabidopsis thaliana
ttaaagcccaccgttgg

SEQ ID NO: 159708 - DNA, 17 bp, Arabidopsis thaliana
ttaaagcccatgcgatt

SEQ ID NO: 159709 - DNA, 17 bp, Arabidopsis thaliana
ttaaagcgattaaattt

SEQ ID NO: 159710 - DNA, 17 bp, Arabidopsis thaliana
ttaaagcgtcttcgaac

SEQ ID NO: 159711 - DNA, 17 bp, Arabidopsis thaliana
ttaaaggaattgacgga

SEQ ID NO: 159712 - DNA, 17 bp, Arabidopsis thaliana
ttaaaggccatctaagc

SEQ ID NO: 159713 - DNA, 17 bp, Arabidopsis thaliana
ttaaaggcgagtaccca

SEQ ID NO: 159714 - DNA, 17 bp, Arabidopsis thaliana
ttaaaggcgtaagaatt

SEQ ID NO: 159715 - DNA, 17 bp, Arabidopsis thaliana
ttaaaggtcaaaattta

SEQ ID NO: 159716 - DNA, 17 bp, Arabidopsis thaliana
ttaaagtcggtccgcaa

SEQ ID NO: 159717 - DNA, 17 bp, Arabidopsis thaliana
ttaaagtcgtgccgatc

SEQ ID NO: 159718 - DNA, 17 bp, Arabidopsis thaliana
ttaaagtgaccgagagc

SEQ ID NO: 159719 - DNA, 17 bp, Arabidopsis thaliana
ttaaagtgactacatcg

SEQ ID NO: 159720 - DNA, 17 bp, Arabidopsis thaliana
ttaaagttaggtcgcaa

SEQ ID NO: 159721 - DNA, 17 bp, Arabidopsis thaliana
ttaaagttcataccgct

SEQ ID NO: 159722 - DNA, 17 bp, Arabidopsis thaliana
ttaaagttgacgctgaa

SEQ ID NO: 159723 - DNA, 17 bp, Arabidopsis thaliana
ttaaagttggagctgtc

SEQ ID NO: 159724 - DNA, 17 bp, Arabidopsis thaliana
ttaaagttgtccttggc

SEQ ID NO: 159725 - DNA, 17 bp, Arabidopsis thaliana
ttaaataaagactcaac

SEQ ID NO: 159726 - DNA, 17 bp, Arabidopsis thaliana
ttaaataagtaggacgt

SEQ ID NO: 159727 - DNA, 17 bp, Arabidopsis thaliana
ttaaataccaggaggtt

SEQ ID NO: 159728 - DNA, 17 bp, Arabidopsis thaliana
ttaaataggtaggacgt

SEQ ID NO: 159729 - DNA, 17 bp, Arabidopsis thaliana
ttaaatcaccggtctcc

SEQ ID NO: 159730 - DNA, 17 bp, Arabidopsis thaliana
ttaaatcacgacttcgc

SEQ ID NO: 159731 - DNA, 17 bp, Arabidopsis thaliana
ttaaatccgccatcata

SEQ ID NO: 159732 - DNA, 17 bp, Arabidopsis thaliana
ttaaatccgtactgctc

SEQ ID NO: 159733 - DNA, 17 bp, Arabidopsis thaliana
ttaaatcctatcctgag

SEQ ID NO: 159734 - DNA, 17 bp, Arabidopsis thaliana
ttaaatcctctaagtca

SEQ ID NO: 159735 - DNA, 17 bp, Arabidopsis thaliana
ttaaatcgacgcagccg

SEQ ID NO: 159736 - DNA, 17 bp, Arabidopsis thaliana
ttaaatcgaggataggt

SEQ ID NO: 159737 - DNA, 17 bp, Arabidopsis thaliana
ttaaatcgcaggtagct

SEQ ID NO: 159738 - DNA, 17 bp, Arabidopsis thaliana
ttaaatcgggtctactc

SEQ ID NO: 159739 - DNA, 17 bp, Arabidopsis thaliana
ttaaatctgctgtgtca

SEQ ID NO: 159740 - DNA, 17 bp, Arabidopsis thaliana
ttaaatgaccgctacac

SEQ ID NO: 159741 - DNA, 17 bp, Arabidopsis thaliana
ttaaatgattctgtaaa

SEQ ID NO: 159742 - DNA, 17 bp, Arabidopsis thaliana
ttaaatgattctgtaac

SEQ ID NO: 159743 - DNA, 17 bp, Arabidopsis thaliana
ttaaatggccaagttga

SEQ ID NO: 159744 - DNA, 17 bp, Arabidopsis thaliana
ttaaatggctaagttga

SEQ ID NO: 159745 - DNA, 17 bp, Arabidopsis thaliana
ttaaattcctacggatc

SEQ ID NO: 159746 - DNA, 17 bp, Arabidopsis thaliana
ttaaattgacatgtggc

SEQ ID NO: 159747 - DNA, 17 bp, Arabidopsis thaliana
ttaaattgctgagtcgc

SEQ ID NO: 159748 - DNA, 17 bp, Arabidopsis thaliana
ttaaattgtcaccgcgg

SEQ ID NO: 159749 - DNA, 17 bp, Arabidopsis thaliana
ttaacaaaaggcacaca

SEQ ID NO: 159750 - DNA, 17 bp, Arabidopsis thaliana
ttaacaacaagaatgca

SEQ ID NO: 159751 - DNA, 17 bp, Arabidopsis thaliana
ttaacaacggccaagat

SEQ ID NO: 159752 - DNA, 17 bp, Arabidopsis thaliana
ttaacaacttttcaggt

SEQ ID NO: 159753 - DNA, 17 bp, Arabidopsis thaliana
ttaacaagaccaaagat

SEQ ID NO: 159754 - DNA, 17 bp, Arabidopsis thaliana
ttaacaagccaaagtgc

SEQ ID NO: 159755 - DNA, 17 bp, Arabidopsis thaliana
ttaacaatgccaagacc

SEQ ID NO: 159756 - DNA, 17 bp, Arabidopsis thaliana
ttaacaattgtctcatg

SEQ ID NO: 159757 - DNA, 17 bp, Arabidopsis thaliana
ttaacaccggcattgac

SEQ ID NO: 159758 - DNA, 17 bp, Arabidopsis thaliana
ttaacagacccattagc

SEQ ID NO: 159759 - DNA, 17 bp, Arabidopsis thaliana
ttaacagaggattgcgg

SEQ ID NO: 159760 - DNA, 17 bp, Arabidopsis thaliana
ttaacagagtcgataac

SEQ ID NO: 159761 - DNA, 17 bp, Arabidopsis thaliana
ttaacagcaggttcacc

SEQ ID NO: 159762 - DNA, 17 bp, Arabidopsis thaliana
ttaacagcctgcccacc

SEQ ID NO: 159763 - DNA, 17 bp, Arabidopsis thaliana
ttaacagctctggcttt

SEQ ID NO: 159764 - DNA, 17 bp, Arabidopsis thaliana
ttaacaggacgccttct

SEQ ID NO: 159765 - DNA, 17 bp, Arabidopsis thaliana
ttaacaggctaaccggg

SEQ ID NO: 159766 - DNA, 17 bp, Arabidopsis thaliana
ttaacagggacagtcgg

SEQ ID NO: 159767 - DNA, 17 bp, Arabidopsis thaliana
ttaacatggtatcagag

SEQ ID NO: 159768 - DNA, 17 bp, Arabidopsis thaliana
ttaaccaaatctaagtg

SEQ ID NO: 159769 - DNA, 17 bp, Arabidopsis thaliana
ttaaccacgacaaaaga

SEQ ID NO: 159770 - DNA, 17 bp, Arabidopsis thaliana
ttaaccacgacgaaaga

SEQ ID NO: 159771 - DNA, 17 bp, Arabidopsis thaliana
ttaaccacgatttccag

SEQ ID NO: 159772 - DNA, 17 bp, Arabidopsis thaliana
ttaaccactcggacata

SEQ ID NO: 159773 - DNA, 17 bp, Arabidopsis thaliana
ttaaccactcggccaaa

SEQ ID NO: 159774 - DNA, 17 bp, Arabidopsis thaliana
ttaaccagcaggtgcta

SEQ ID NO: 159775 - DNA, 17 bp, Arabidopsis thaliana
ttaaccaggatacaatt

SEQ ID NO: 159776 - DNA, 17 bp, Arabidopsis thaliana
ttaaccagttggaggtt

SEQ ID NO: 159777 - DNA, 17 bp, Arabidopsis thaliana
ttaacccagttcacgtt

SEQ ID NO: 159778 - DNA, 17 bp, Arabidopsis thaliana
ttaacccagttgacctg

SEQ ID NO: 159779 - DNA, 17 bp, Arabidopsis thaliana
ttaacccgcctggccgc

SEQ ID NO: 159780 - DNA, 17 bp, Arabidopsis thaliana
ttaaccctcgttgtatg

SEQ ID NO: 159781 - DNA, 17 bp, Arabidopsis thaliana
ttaacccttttattcac

SEQ ID NO: 159782 - DNA, 17 bp, Arabidopsis thaliana
ttaaccgacgcggatta

SEQ ID NO: 159783 - DNA, 17 bp, Arabidopsis thaliana
ttaaccgagtcgtatca

SEQ ID NO: 159784 - DNA, 17 bp, Arabidopsis thaliana
ttaaccgctatcgtacc

SEQ ID NO: 159785 - DNA, 17 bp, Arabidopsis thaliana
ttaaccggattggtcat

SEQ ID NO: 159786 - DNA, 17 bp, Arabidopsis thaliana
ttaaccggttggacctg

SEQ ID NO: 159787 - DNA, 17 bp, Arabidopsis thaliana
ttaaccgtcgtagtctg

SEQ ID NO: 159788 - DNA, 17 bp, Arabidopsis thaliana
ttaaccgtctgcagatt

SEQ ID NO: 159789 - DNA, 17 bp, Arabidopsis thaliana
ttaaccgtgactgattt

SEQ ID NO: 159790 - DNA, 17 bp, Arabidopsis thaliana
ttaaccgtgatcactta

SEQ ID NO: 159791 - DNA, 17 bp, Arabidopsis thaliana
ttaaccgtggtcattag

SEQ ID NO: 159792 - DNA, 17 bp, Arabidopsis thaliana
ttaaccgttggacatgc

SEQ ID NO: 159793 - DNA, 17 bp, Arabidopsis thaliana
ttaacctaagctgctga

SEQ ID NO: 159794 - DNA, 17 bp, Arabidopsis thaliana
ttaacctaagctgctta

SEQ ID NO: 159795 - DNA, 17 bp, Arabidopsis thaliana
ttaacctccaaaacaac

SEQ ID NO: 159796 - DNA, 17 bp, Arabidopsis thaliana
ttaacctcctctcacag

SEQ ID NO: 159797 - DNA, 17 bp, Arabidopsis thaliana
ttaacctcgccgtatga

SEQ ID NO: 159798 - DNA, 17 bp, Arabidopsis thaliana
ttaacctcggttagaca

SEQ ID NO: 159799 - DNA, 17 bp, Arabidopsis thaliana
ttaacctgaccgctacc

SEQ ID NO: 159800 - DNA, 17 bp, Arabidopsis thaliana
ttaacctggtgtggatc

SEQ ID NO: 159801 - DNA, 17 bp, Arabidopsis thaliana
ttaacctggtgtgggtc

SEQ ID NO: 159802 - DNA, 17 bp, Arabidopsis thaliana
ttaacctggtgtgggtt

SEQ ID NO: 159803 - DNA, 17 bp, Arabidopsis thaliana
ttaaccttccgggtcag

SEQ ID NO: 159804 - DNA, 17 bp, Arabidopsis thaliana
ttaaccttggacccatc

SEQ ID NO: 159805 - DNA, 17 bp, Arabidopsis thaliana
ttaacctttcccgtcag

SEQ ID NO: 159806 - DNA, 17 bp, Arabidopsis thaliana
ttaacgaaatgacacga

SEQ ID NO: 159807 - DNA, 17 bp, Arabidopsis thaliana
ttaacgaaatgaccgga

SEQ ID NO: 159808 - DNA, 17 bp, Arabidopsis thaliana
ttaacgaacgagacctc

SEQ ID NO: 159809 - DNA, 17 bp, Arabidopsis thaliana
ttaacgaccatgtcgca

SEQ ID NO: 159810 - DNA, 17 bp, Arabidopsis thaliana
ttaacgacccagaaagc

SEQ ID NO: 159811 - DNA, 17 bp, Arabidopsis thaliana
ttaacgacgtattggtt

SEQ ID NO: 159812 - DNA, 17 bp, Arabidopsis thaliana
ttaacgacgtgcccaaa

SEQ ID NO: 159813 - DNA, 17 bp, Arabidopsis thaliana
ttaacgacttccaagct

SEQ ID NO: 159814 - DNA, 17 bp, Arabidopsis thaliana
ttaacgacttccgtaac

SEQ ID NO: 159815 - DNA, 17 bp, Arabidopsis thaliana
ttaacgagattcccact

SEQ ID NO: 159816 - DNA, 17 bp, Arabidopsis thaliana
ttaacgagcttaggttt

SEQ ID NO: 159817 - DNA, 17 bp, Arabidopsis thaliana
ttaacgaggatccattg

SEQ ID NO: 159818 - DNA, 17 bp, Arabidopsis thaliana
ttaacgaggctctgctc

SEQ ID NO: 159819 - DNA, 17 bp, Arabidopsis thaliana
ttaacgatgagtcgatt

SEQ ID NO: 159820 - DNA, 17 bp, Arabidopsis thaliana
ttaacgatgtcaacctt

SEQ ID NO: 159821 - DNA, 17 bp, Arabidopsis thaliana
ttaacgatttccgtaac

SEQ ID NO: 159822 - DNA, 17 bp, Arabidopsis thaliana
ttaacgatttgcgaggg

SEQ ID NO: 159823 - DNA, 17 bp, Arabidopsis thaliana
ttaacgccgtagttgac

SEQ ID NO: 159824 - DNA, 17 bp, Arabidopsis thaliana
ttaacgccgttgagtcg

SEQ ID NO: 159825 - DNA, 17 bp, Arabidopsis thaliana
ttaacgcctcggagatc

SEQ ID NO: 159826 - DNA, 17 bp, Arabidopsis thaliana
ttaacgcctgctaacgc

SEQ ID NO: 159827 - DNA, 17 bp, Arabidopsis thaliana
ttaacgcggattacggt

SEQ ID NO: 159828 - DNA, 17 bp, Arabidopsis thaliana
ttaacggactaaaacgg

SEQ ID NO: 159829 - DNA, 17 bp, Arabidopsis thaliana
ttaacggatgataacgg

SEQ ID NO: 159830 - DNA, 17 bp, Arabidopsis thaliana
ttaacggccgttatcga

SEQ ID NO: 159831 - DNA, 17 bp, Arabidopsis thaliana
ttaacggctgttaactt

SEQ ID NO: 159832 - DNA, 17 bp, Arabidopsis thaliana
ttaacgggatgggatgt

SEQ ID NO: 159833 - DNA, 17 bp, Arabidopsis thaliana
ttaacgggcgttaacag

SEQ ID NO: 159834 - DNA, 17 bp, Arabidopsis thaliana
ttaacgggtcagcgaat

SEQ ID NO: 159835 - DNA, 17 bp, Arabidopsis thaliana
ttaacgggtcatgggct

SEQ ID NO: 159836 - DNA, 17 bp, Arabidopsis thaliana
ttaacgggtttggcagg

SEQ ID NO: 159837 - DNA, 17 bp, Arabidopsis thaliana
ttaacggtcgttatcgg

SEQ ID NO: 159838 - DNA, 17 bp, Arabidopsis thaliana
ttaacggtctgctcttt

SEQ ID NO: 159839 - DNA, 17 bp, Arabidopsis thaliana
ttaacggttttctgtca

SEQ ID NO: 159840 - DNA, 17 bp, Arabidopsis thaliana
ttaacgtcatctaagct

SEQ ID NO: 159841 - DNA, 17 bp, Arabidopsis thaliana
ttaacgtctgctaacgg

SEQ ID NO: 159842 - DNA, 17 bp, Arabidopsis thaliana
ttaacgtgtcacattcc

SEQ ID NO: 159843 - DNA, 17 bp, Arabidopsis thaliana
ttaactatggagttctg

SEQ ID NO: 159844 - DNA, 17 bp, Arabidopsis thaliana
ttaactcaaattgctgc

SEQ ID NO: 159845 - DNA, 17 bp, Arabidopsis thaliana
ttaactcatttgtctcg

SEQ ID NO: 159846 - DNA, 17 bp, Arabidopsis thaliana
ttaactccaaggttaag

SEQ ID NO: 159847 - DNA, 17 bp, Arabidopsis thaliana
ttaactccaatctgtcc

SEQ ID NO: 159848 - DNA, 17 bp, Arabidopsis thaliana
ttaactcctatctttgg

SEQ ID NO: 159849 - DNA, 17 bp, Arabidopsis thaliana
ttaactctgttcagatc

SEQ ID NO: 159850 - DNA, 17 bp, Arabidopsis thaliana
ttaactgaaccgggtct

SEQ ID NO: 159851 - DNA, 17 bp, Arabidopsis thaliana
ttaactgacctgccgac

SEQ ID NO: 159852 - DNA, 17 bp, Arabidopsis thaliana
ttaactgacctgccgag

SEQ ID NO: 159853 - DNA, 17 bp, Arabidopsis thaliana
ttaactgacgcggtaaa

SEQ ID NO: 159854 - DNA, 17 bp, Arabidopsis thaliana
ttaactgatggaagtct

SEQ ID NO: 159855 - DNA, 17 bp, Arabidopsis thaliana
ttaactgatggcagtcc

SEQ ID NO: 159856 - DNA, 17 bp, Arabidopsis thaliana
ttaactgcatgcaggtg

SEQ ID NO: 159857 - DNA, 17 bp, Arabidopsis thaliana
ttaactgcgaggactgc

SEQ ID NO: 159858 - DNA, 17 bp, Arabidopsis thaliana
ttaactgcggttagcga

SEQ ID NO: 159859 - DNA, 17 bp, Arabidopsis thaliana
ttaactgctccgatcaa

SEQ ID NO: 159860 - DNA, 17 bp, Arabidopsis thaliana
ttaactggagccagatc

SEQ ID NO: 159861 - DNA, 17 bp, Arabidopsis thaliana
ttaactgtgagactcgt

SEQ ID NO: 159862 - DNA, 17 bp, Arabidopsis thaliana
ttaactgtggagttctc

SEQ ID NO: 159863 - DNA, 17 bp, Arabidopsis thaliana
ttaacttagtcgcatcc

SEQ ID NO: 159864 - DNA, 17 bp, Arabidopsis thaliana
ttaacttctgtcgaaac

SEQ ID NO: 159865 - DNA, 17 bp, Arabidopsis thaliana
ttaacttggataccgtg

SEQ ID NO: 159866 - DNA, 17 bp, Arabidopsis thaliana
ttaacttgggagcagga

SEQ ID NO: 159867 - DNA, 17 bp, Arabidopsis thaliana
ttaactttaccgtgaaa

SEQ ID NO: 159868 - DNA, 17 bp, Arabidopsis thaliana
ttaactttcaacacgtg

SEQ ID NO: 159869 - DNA, 17 bp, Arabidopsis thaliana
ttaactttgacccttca

SEQ ID NO: 159870 - DNA, 17 bp, Arabidopsis thaliana
ttaacttttgcataccg

SEQ ID NO: 159871 - DNA, 17 bp, Arabidopsis thaliana
ttaagaaacttgcaagg

SEQ ID NO: 159872 - DNA, 17 bp, Arabidopsis thaliana
ttaagaaacttgtaagg

SEQ ID NO: 159873 - DNA, 17 bp, Arabidopsis thaliana
ttaagacagcaggacgg

SEQ ID NO: 159874 - DNA, 17 bp, Arabidopsis thaliana
ttaagaccagtggaaag

SEQ ID NO: 159875 - DNA, 17 bp, Arabidopsis thaliana
ttaagacctggttgcgg

SEQ ID NO: 159876 - DNA, 17 bp, Arabidopsis thaliana
ttaagacggtgacagat

SEQ ID NO: 159877 - DNA, 17 bp, Arabidopsis thaliana
ttaagactttgatgtct

SEQ ID NO: 159878 - DNA, 17 bp, Arabidopsis thaliana
ttaagagccattgcgat

SEQ ID NO: 159879 - DNA, 17 bp, Arabidopsis thaliana
ttaagaggacttggaac

SEQ ID NO: 159880 - DNA, 17 bp, Arabidopsis thaliana
ttaagaggatgattctg

SEQ ID NO: 159881 - DNA, 17 bp, Arabidopsis thaliana
ttaagatcaggttgcgg

SEQ ID NO: 159882 - DNA, 17 bp, Arabidopsis thaliana
ttaagatccagttgcgg

SEQ ID NO: 159883 - DNA, 17 bp, Arabidopsis thaliana
ttaagatccggttgcgg

SEQ ID NO: 159884 - DNA, 17 bp, Arabidopsis thaliana
ttaagatccgttgcggt

SEQ ID NO: 159885 - DNA, 17 bp, Arabidopsis thaliana
ttaagatccgtttgcgg

SEQ ID NO: 159886 - DNA, 17 bp, Arabidopsis thaliana
ttaagatccgttttcgc

SEQ ID NO: 159887 - DNA, 17 bp, Arabidopsis thaliana
ttaagatcctgttgcgg

SEQ ID NO: 159888 - DNA, 17 bp, Arabidopsis thaliana
ttaagatcgagttgcgg

SEQ ID NO: 159889 - DNA, 17 bp, Arabidopsis thaliana
ttaagatcgggttgcag

SEQ ID NO: 159890 - DNA, 17 bp, Arabidopsis thaliana
ttaagatcgggttgcgg

SEQ ID NO: 159891 - DNA, 17 bp, Arabidopsis thaliana
ttaagatcgtggcacgt

SEQ ID NO: 159892 - DNA, 17 bp, Arabidopsis thaliana
ttaagatctggttgcgg

SEQ ID NO: 159893 - DNA, 17 bp, Arabidopsis thaliana
ttaagatggctcgagac

SEQ ID NO: 159894 - DNA, 17 bp, Arabidopsis thaliana
ttaagatgggtcagcgc

SEQ ID NO: 159895 - DNA, 17 bp, Arabidopsis thaliana
ttaagattcagcttttg

SEQ ID NO: 159896 - DNA, 17 bp, Arabidopsis thaliana
ttaagatttcgggtcag

SEQ ID NO: 159897 - DNA, 17 bp, Arabidopsis thaliana
ttaagcagcagatccga

SEQ ID NO: 159898 - DNA, 17 bp, Arabidopsis thaliana
ttaagcagctactgtca

SEQ ID NO: 159899 - DNA, 17 bp, Arabidopsis thaliana
ttaagcattctccactg

SEQ ID NO: 159900 - DNA, 17 bp, Arabidopsis thaliana
ttaagcattctcttgtg

SEQ ID NO: 159901 - DNA, 17 bp, Arabidopsis thaliana
ttaagccaagtccttcc

SEQ ID NO: 159902 - DNA, 17 bp, Arabidopsis thaliana
ttaagccagttttggct

SEQ ID NO: 159903 - DNA, 17 bp, Arabidopsis thaliana
ttaagccggtattgtcg

SEQ ID NO: 159904 - DNA, 17 bp, Arabidopsis thaliana
ttaagcgaaggcttggc

SEQ ID NO: 159905 - DNA, 17 bp, Arabidopsis thaliana
ttaagcgactaccgttt

SEQ ID NO: 159906 - DNA, 17 bp, Arabidopsis thaliana
ttaagcgccatccattt

SEQ ID NO: 159907 - DNA, 17 bp, Arabidopsis thaliana
ttaagcgccttatgtct

SEQ ID NO: 159908 - DNA, 17 bp, Arabidopsis thaliana
ttaagcggactaggtgg

SEQ ID NO: 159909 - DNA, 17 bp, Arabidopsis thaliana
ttaagctaccagcatga

SEQ ID NO: 159910 - DNA, 17 bp, Arabidopsis thaliana
ttaagctgccagcatga

SEQ ID NO: 159911 - DNA, 17 bp, Arabidopsis thaliana
ttaaggaagttggtgac

SEQ ID NO: 159912 - DNA, 17 bp, Arabidopsis thaliana
ttaaggaatgcagacat

SEQ ID NO: 159913 - DNA, 17 bp, Arabidopsis thaliana
ttaaggaatgcagacct

SEQ ID NO: 159914 - DNA, 17 bp, Arabidopsis thaliana
ttaaggacacagagcta

SEQ ID NO: 159915 - DNA, 17 bp, Arabidopsis thaliana
ttaaggaccctgttccc

SEQ ID NO: 159916 - DNA, 17 bp, Arabidopsis thaliana
ttaaggagaacccatgt

SEQ ID NO: 159917 - DNA, 17 bp, Arabidopsis thaliana
ttaaggattcccttatt

SEQ ID NO: 159918 - DNA, 17 bp, Arabidopsis thaliana
ttaaggatttgatttgt

SEQ ID NO: 159919 - DNA, 17 bp, Arabidopsis thaliana
ttaaggcaggtccgttg

SEQ ID NO: 159920 - DNA, 17 bp, Arabidopsis thaliana
ttaaggcgataccaact

SEQ ID NO: 159921 - DNA, 17 bp, Arabidopsis thaliana
ttaaggcttggccaaat

SEQ ID NO: 159922 - DNA, 17 bp, Arabidopsis thaliana
ttaagggatcaccgttg

SEQ ID NO: 159923 - DNA, 17 bp, Arabidopsis thaliana
ttaagggcacgtctgcc

SEQ ID NO: 159924 - DNA, 17 bp, Arabidopsis thaliana
ttaagggcccgaatggt

SEQ ID NO: 159925 - DNA, 17 bp, Arabidopsis thaliana
ttaagggctgctaactt

SEQ ID NO: 159926 - DNA, 17 bp, Arabidopsis thaliana
ttaagggtctcgtcccg

SEQ ID NO: 159927 - DNA, 17 bp, Arabidopsis thaliana
ttaagggtgaacgacct

SEQ ID NO: 159928 - DNA, 17 bp, Arabidopsis thaliana
ttaagtaacgctatgcc

SEQ ID NO: 159929 - DNA, 17 bp, Arabidopsis thaliana
ttaagtaacgtcctctc

SEQ ID NO: 159930 - DNA, 17 bp, Arabidopsis thaliana
ttaagtaacgtcctgtc

SEQ ID NO: 159931 - DNA, 17 bp, Arabidopsis thaliana
ttaagtactcagagatc

SEQ ID NO: 159932 - DNA, 17 bp, Arabidopsis thaliana
ttaagtactgacccacc

SEQ ID NO: 159933 - DNA, 17 bp, Arabidopsis thaliana
ttaagtactgacccagc

SEQ ID NO: 159934 - DNA, 17 bp, Arabidopsis thaliana
ttaagtatctttagcgg

SEQ ID NO: 159935 - DNA, 17 bp, Arabidopsis thaliana
ttaagtccagaccactg

SEQ ID NO: 159936 - DNA, 17 bp, Arabidopsis thaliana
ttaagtccgccgtcaaa

SEQ ID NO: 159937 - DNA, 17 bp, Arabidopsis thaliana
ttaagtcgtaaataagt

SEQ ID NO: 159938 - DNA, 17 bp, Arabidopsis thaliana
ttaagtgaatgaagaga

SEQ ID NO: 159939 - DNA, 17 bp, Arabidopsis thaliana
ttaagtgaccacgagcg

SEQ ID NO: 159940 - DNA, 17 bp, Arabidopsis thaliana
ttaagtgcacgtctgcc

SEQ ID NO: 159941 - DNA, 17 bp, Arabidopsis thaliana
ttaagtggttctcgatt

SEQ ID NO: 159942 - DNA, 17 bp, Arabidopsis thaliana
ttaagtgtgccaatccc

SEQ ID NO: 159943 - DNA, 17 bp, Arabidopsis thaliana
ttaagttgagttgggct

SEQ ID NO: 159944 - DNA, 17 bp, Arabidopsis thaliana
ttaagttgtccttggct

SEQ ID NO: 159945 - DNA, 17 bp, Arabidopsis thaliana
ttaagtttccaaaaagt

SEQ ID NO: 159946 - DNA, 17 bp, Arabidopsis thaliana
ttaagtttccaacaacc

SEQ ID NO: 159947 - DNA, 17 bp, Arabidopsis thaliana
ttaagtttccagagtac

SEQ ID NO: 159948 - DNA, 17 bp, Arabidopsis thaliana
ttaagtttgttgctcag

SEQ ID NO: 159949 - DNA, 17 bp, Arabidopsis thaliana
ttaatagagaccatcgt

SEQ ID NO: 159950 - DNA, 17 bp, Arabidopsis thaliana
ttaatagcccttttccc

SEQ ID NO: 159951 - DNA, 17 bp, Arabidopsis thaliana
ttaatagctcgaccgct

SEQ ID NO: 159952 - DNA, 17 bp, Arabidopsis thaliana
ttaatcaacagtgtcgg

SEQ ID NO: 159953 - DNA, 17 bp, Arabidopsis thaliana
ttaatcaagccttgcga

SEQ ID NO: 159954 - DNA, 17 bp, Arabidopsis thaliana
ttaatcaccattgacga

SEQ ID NO: 159955 - DNA, 17 bp, Arabidopsis thaliana
ttaatcagcgagttaac

SEQ ID NO: 159956 - DNA, 17 bp, Arabidopsis thaliana
ttaatccaatccacatt

SEQ ID NO: 159957 - DNA, 17 bp, Arabidopsis thaliana
ttaatccacgaactgca

SEQ ID NO: 159958 - DNA, 17 bp, Arabidopsis thaliana
ttaatccgacaggttct

SEQ ID NO: 159959 - DNA, 17 bp, Arabidopsis thaliana
ttaatccgctctgctag

SEQ ID NO: 159960 - DNA, 17 bp, Arabidopsis thaliana
ttaatccgtcagcggtc

SEQ ID NO: 159961 - DNA, 17 bp, Arabidopsis thaliana
ttaatccgtcagcggtg

SEQ ID NO: 159962 - DNA, 17 bp, Arabidopsis thaliana
ttaatcgcaccctgtag

SEQ ID NO: 159963 - DNA, 17 bp, Arabidopsis thaliana
ttaatcgcagcctgtag

SEQ ID NO: 159964 - DNA, 17 bp, Arabidopsis thaliana
ttaatcgcaggtcaagt

SEQ ID NO: 159965 - DNA, 17 bp, Arabidopsis thaliana
ttaatcgccggctttgt

SEQ ID NO: 159966 - DNA, 17 bp, Arabidopsis thaliana
ttaatcgctcctgtaga

SEQ ID NO: 159967 - DNA, 17 bp, Arabidopsis thaliana
ttaatcggaaacttcgc

SEQ ID NO: 159968 - DNA, 17 bp, Arabidopsis thaliana
ttaatcggcgacgacga

SEQ ID NO: 159969 - DNA, 17 bp, Arabidopsis thaliana
ttaatcggttcaccgga

SEQ ID NO: 159970 - DNA, 17 bp, Arabidopsis thaliana
ttaatcgtaccgagggt

SEQ ID NO: 159971 - DNA, 17 bp, Arabidopsis thaliana
ttaatcgtctttggatc

SEQ ID NO: 159972 - DNA, 17 bp, Arabidopsis thaliana
ttaatctcagaaacatg

SEQ ID NO: 159973 - DNA, 17 bp, Arabidopsis thaliana
ttaatctcgaagccgcg

SEQ ID NO: 159974 - DNA, 17 bp, Arabidopsis thaliana
ttaatctctctgaatgc

SEQ ID NO: 159975 - DNA, 17 bp, Arabidopsis thaliana
ttaatctcttgcgtgtg

SEQ ID NO: 159976 - DNA, 17 bp, Arabidopsis thaliana
ttaatctgatgtggatt

SEQ ID NO: 159977 - DNA, 17 bp, Arabidopsis thaliana
ttaatctggcattggtt

SEQ ID NO: 159978 - DNA, 17 bp, Arabidopsis thaliana
ttaatctggctttggtt

SEQ ID NO: 159979 - DNA, 17 bp, Arabidopsis thaliana
ttaatctggtgcgcctc

SEQ ID NO: 159980 - DNA, 17 bp, Arabidopsis thaliana
ttaatcttctacttggg

SEQ ID NO: 159981 - DNA, 17 bp, Arabidopsis thaliana
ttaatcttctcggcccc

SEQ ID NO: 159982 - DNA, 17 bp, Arabidopsis thaliana
ttaatcttctttggatc

SEQ ID NO: 159983 - DNA, 17 bp, Arabidopsis thaliana
ttaatcttctttgggtc

SEQ ID NO: 159984 - DNA, 17 bp, Arabidopsis thaliana
ttaatgaacctgtggtc

SEQ ID NO: 159985 - DNA, 17 bp, Arabidopsis thaliana
ttaatgacgtgtcctaa

SEQ ID NO: 159986 - DNA, 17 bp, Arabidopsis thaliana
ttaatgagccattcgaa

SEQ ID NO: 159987 - DNA, 17 bp, Arabidopsis thaliana
ttaatgagccattcgca

SEQ ID NO: 159988 - DNA, 17 bp, Arabidopsis thaliana
ttaatgctcaggaggtg

SEQ ID NO: 159989 - DNA, 17 bp, Arabidopsis thaliana
ttaatggacatggacct

SEQ ID NO: 159990 - DNA, 17 bp, Arabidopsis thaliana
ttaatggacatgggcct

SEQ ID NO: 159991 - DNA, 17 bp, Arabidopsis thaliana
ttaatgtactaggtgat

SEQ ID NO: 159992 - DNA, 17 bp, Arabidopsis thaliana
ttaatgtcgctaggatt

SEQ ID NO: 159993 - DNA, 17 bp, Arabidopsis thaliana
ttaatgtgtgtcattcc

SEQ ID NO: 159994 - DNA, 17 bp, Arabidopsis thaliana
ttaattcacgggcgatg

SEQ ID NO: 159995 - DNA, 17 bp, Arabidopsis thaliana
ttaattccctgatgacc

SEQ ID NO: 159996 - DNA, 17 bp, Arabidopsis thaliana
ttaattccgttaacgaa

SEQ ID NO: 159997 - DNA, 17 bp, Arabidopsis thaliana
ttaattggccgggtcgt

SEQ ID NO: 159998 - DNA, 17 bp, Arabidopsis thaliana
ttaattgtgccaatccc

SEQ ID NO: 159999 - DNA, 17 bp, Arabidopsis thaliana
ttaatttcacgggacgg

SEQ ID NO: 160000 - DNA, 17 bp, Arabidopsis thaliana
ttaatttcagatccttg

SEQ ID NO: 160001 - DNA, 17 bp, Arabidopsis thaliana
ttaatttccgagttcta

SEQ ID NO: 160002 - DNA, 17 bp, Arabidopsis thaliana
ttaatttgcggacatgc

SEQ ID NO: 160003 - DNA, 17 bp, Arabidopsis thaliana
ttaattttctaggaacc

SEQ ID NO: 160004 - DNA, 17 bp, Arabidopsis thaliana
ttacaaacacgctcttg

SEQ ID NO: 160005 - DNA, 17 bp, Arabidopsis thaliana
ttacaaacagtggaggc

SEQ ID NO: 160006 - DNA, 17 bp, Arabidopsis thaliana
ttacaaaccatataggc

SEQ ID NO: 160007 - DNA, 17 bp, Arabidopsis thaliana
ttacaaactataccgtc

SEQ ID NO: 160008 - DNA, 17 bp, Arabidopsis thaliana
ttacaaactgctcagac

SEQ ID NO: 160009 - DNA, 17 bp, Arabidopsis thaliana
ttacaaagaccgggagc

SEQ ID NO: 160010 - DNA, 17 bp, Arabidopsis thaliana
ttacaaagccacttctt

SEQ ID NO: 160011 - DNA, 17 bp, Arabidopsis thaliana
ttacaaagttgaggtac

SEQ ID NO: 160012 - DNA, 17 bp, Arabidopsis thaliana
ttacaaatctccacaag

SEQ ID NO: 160013 - DNA, 17 bp, Arabidopsis thaliana
ttacaacaggctcttgc

SEQ ID NO: 160014 - DNA, 17 bp, Arabidopsis thaliana
ttacaaccaaatgccat

SEQ ID NO: 160015 - DNA, 17 bp, Arabidopsis thaliana
ttacaaccgtgactcca

SEQ ID NO: 160016 - DNA, 17 bp, Arabidopsis thaliana
ttacaactgataaccgt

SEQ ID NO: 160017 - DNA, 17 bp, Arabidopsis thaliana
ttacaagacattctacc

SEQ ID NO: 160018 - DNA, 17 bp, Arabidopsis thaliana
ttacaagatcggattgc

SEQ ID NO: 160019 - DNA, 17 bp, Arabidopsis thaliana
ttacaagatcgggttgc

SEQ ID NO: 160020 - DNA, 17 bp, Arabidopsis thaliana
ttacaagcatatgcctt

SEQ ID NO: 160021 - DNA, 17 bp, Arabidopsis thaliana
ttacaagcctttcgcag

SEQ ID NO: 160022 - DNA, 17 bp, Arabidopsis thaliana
ttacaaggtttatcggt

SEQ ID NO: 160023 - DNA, 17 bp, Arabidopsis thaliana
ttacaatctcaagatgg

SEQ ID NO: 160024 - DNA, 17 bp, Arabidopsis thaliana
ttacaatggctgccact

SEQ ID NO: 160025 - DNA, 17 bp, Arabidopsis thaliana
ttacaatggctgtcact

SEQ ID NO: 160026 - DNA, 17 bp, Arabidopsis thaliana
ttacaatttttgtatat

SEQ ID NO: 160027 - DNA, 17 bp, Arabidopsis thaliana
ttacacacctacaaacc

SEQ ID NO: 160028 - DNA, 17 bp, Arabidopsis thaliana
ttacacagatggaatct

SEQ ID NO: 160029 - DNA, 17 bp, Arabidopsis thaliana
ttacacagatgggatca

SEQ ID NO: 160030 - DNA, 17 bp, Arabidopsis thaliana
ttacacagatgggatct

SEQ ID NO: 160031 - DNA, 17 bp, Arabidopsis thaliana
ttacaccagttggctat

SEQ ID NO: 160032 - DNA, 17 bp, Arabidopsis thaliana
ttacacgtatgatgtcg

SEQ ID NO: 160033 - DNA, 17 bp, Arabidopsis thaliana
ttacacgtctgcctggg

SEQ ID NO: 160034 - DNA, 17 bp, Arabidopsis thaliana
ttacactaactaacgcc

SEQ ID NO: 160035 - DNA, 17 bp, Arabidopsis thaliana
ttacactagtcccaact

SEQ ID NO: 160036 - DNA, 17 bp, Arabidopsis thaliana
ttacactccagcgatgg

SEQ ID NO: 160037 - DNA, 17 bp, Arabidopsis thaliana
ttacactcgtttgggtt

SEQ ID NO: 160038 - DNA, 17 bp, Arabidopsis thaliana
ttacactgaaggcaatg

SEQ ID NO: 160039 - DNA, 17 bp, Arabidopsis thaliana
ttacactgctctatctg

SEQ ID NO: 160040 - DNA, 17 bp, Arabidopsis thaliana
ttacactgttacataga

SEQ ID NO: 160041 - DNA, 17 bp, Arabidopsis thaliana
ttacagaagactgcggg

SEQ ID NO: 160042 - DNA, 17 bp, Arabidopsis thaliana
ttacagaatcacgtttg

SEQ ID NO: 160043 - DNA, 17 bp, Arabidopsis thaliana
ttacagaatctacgcaa

SEQ ID NO: 160044 - DNA, 17 bp, Arabidopsis thaliana
ttacagacacgccactg

SEQ ID NO: 160045 - DNA, 17 bp, Arabidopsis thaliana
ttacagactgttcaaac

SEQ ID NO: 160046 - DNA, 17 bp, Arabidopsis thaliana
ttacagactgttcagac

SEQ ID NO: 160047 - DNA, 17 bp, Arabidopsis thaliana
ttacagactgttcagat

SEQ ID NO: 160048 - DNA, 17 bp, Arabidopsis thaliana
ttacagccctttgtcgc

SEQ ID NO: 160049 - DNA, 17 bp, Arabidopsis thaliana
ttacagcggctgtcatt

SEQ ID NO: 160050 - DNA, 17 bp, Arabidopsis thaliana
ttacagcgggcctcggt

SEQ ID NO: 160051 - DNA, 17 bp, Arabidopsis thaliana
ttacagctgtcgtggat

SEQ ID NO: 160052 - DNA, 17 bp, Arabidopsis thaliana
ttacaggcctagaccgt

SEQ ID NO: 160053 - DNA, 17 bp, Arabidopsis thaliana
ttacaggctttggccca

SEQ ID NO: 160054 - DNA, 17 bp, Arabidopsis thaliana
ttacagggccgcttagt

SEQ ID NO: 160055 - DNA, 17 bp, Arabidopsis thaliana
ttacagggtccgtgcgt

SEQ ID NO: 160056 - DNA, 17 bp, Arabidopsis thaliana
ttacaggtcacaaggca

SEQ ID NO: 160057 - DNA, 17 bp, Arabidopsis thaliana
ttacaggttcgaatcct

SEQ ID NO: 160058 - DNA, 17 bp, Arabidopsis thaliana
ttacagtctcctgtaca

SEQ ID NO: 160059 - DNA, 17 bp, Arabidopsis thaliana
ttacagtctctcgaccg

SEQ ID NO: 160060 - DNA, 17 bp, Arabidopsis thaliana
ttacagtgggtggacac

SEQ ID NO: 160061 - DNA, 17 bp, Arabidopsis thaliana
ttacagttccgttgcag

SEQ ID NO: 160062 - DNA, 17 bp, Arabidopsis thaliana
ttacagttgcgggcgct

SEQ ID NO: 160063 - DNA, 17 bp, Arabidopsis thaliana
ttacagttgcgggcggt

SEQ ID NO: 160064 - DNA, 17 bp, Arabidopsis thaliana
ttacagttgtaactccg

SEQ ID NO: 160065 - DNA, 17 bp, Arabidopsis thaliana
ttacagtttatcagctt

SEQ ID NO: 160066 - DNA, 17 bp, Arabidopsis thaliana
ttacataaaaggtcgac

SEQ ID NO: 160067 - DNA, 17 bp, Arabidopsis thaliana
ttacatagatttgctcg

SEQ ID NO: 160068 - DNA, 17 bp, Arabidopsis thaliana
ttacatcaagtgcggct

SEQ ID NO: 160069 - DNA, 17 bp, Arabidopsis thaliana
ttacatcgacaatggcc

SEQ ID NO: 160070 - DNA, 17 bp, Arabidopsis thaliana
ttacatctcccagtggc

SEQ ID NO: 160071 - DNA, 17 bp, Arabidopsis thaliana
ttacatctctccgatgg

SEQ ID NO: 160072 - DNA, 17 bp, Arabidopsis thaliana
ttacatgagaaggaggc

SEQ ID NO: 160073 - DNA, 17 bp, Arabidopsis thaliana
ttacatgatgtggtttc

SEQ ID NO: 160074 - DNA, 17 bp, Arabidopsis thaliana
ttacatgctgtggttcc

SEQ ID NO: 160075 - DNA, 17 bp, Arabidopsis thaliana
ttacatgctgtggtttc

SEQ ID NO: 160076 - DNA, 17 bp, Arabidopsis thaliana
ttacatggaagctggcc

SEQ ID NO: 160077 - DNA, 17 bp, Arabidopsis thaliana
ttacatgttgtggtttc

SEQ ID NO: 160078 - DNA, 17 bp, Arabidopsis thaliana
ttacattcgagatccga

SEQ ID NO: 160079 - DNA, 17 bp, Arabidopsis thaliana
ttacattctcaacggta

SEQ ID NO: 160080 - DNA, 17 bp, Arabidopsis thaliana
ttacattctgtggtttc

SEQ ID NO: 160081 - DNA, 17 bp, Arabidopsis thaliana
ttacattttatcggtcg

SEQ ID NO: 160082 - DNA, 17 bp, Arabidopsis thaliana
ttacattttcgtgattt

SEQ ID NO: 160083 - DNA, 17 bp, Arabidopsis thaliana
ttaccaacagtgtgacc

SEQ ID NO: 160084 - DNA, 17 bp, Arabidopsis thaliana
ttaccaacgatcatgga

SEQ ID NO: 160085 - DNA, 17 bp, Arabidopsis thaliana
ttaccaacggcgtcgta

SEQ ID NO: 160086 - DNA, 17 bp, Arabidopsis thaliana
ttaccaaggcgatgatc

SEQ ID NO: 160087 - DNA, 17 bp, Arabidopsis thaliana
ttaccaaggtaagacgt

SEQ ID NO: 160088 - DNA, 17 bp, Arabidopsis thaliana
ttaccaatggcggttaa

SEQ ID NO: 160089 - DNA, 17 bp, Arabidopsis thaliana
ttaccaattgacttggg

SEQ ID NO: 160090 - DNA, 17 bp, Arabidopsis thaliana
ttaccacactttgaacc

SEQ ID NO: 160091 - DNA, 17 bp, Arabidopsis thaliana
ttaccacagggataact

SEQ ID NO: 160092 - DNA, 17 bp, Arabidopsis thaliana
ttaccacccagccgcgc

SEQ ID NO: 160093 - DNA, 17 bp, Arabidopsis thaliana
ttaccaccgagcggccg

SEQ ID NO: 160094 - DNA, 17 bp, Arabidopsis thaliana
ttaccaccgagcggcgg

SEQ ID NO: 160095 - DNA, 17 bp, Arabidopsis thaliana
ttaccacgaacggcggt

SEQ ID NO: 160096 - DNA, 17 bp, Arabidopsis thaliana
ttaccactggaccaaca

SEQ ID NO: 160097 - DNA, 17 bp, Arabidopsis thaliana
ttaccactgggccaaga

SEQ ID NO: 160098 - DNA, 17 bp, Arabidopsis thaliana
ttaccagattgacccgc

SEQ ID NO: 160099 - DNA, 17 bp, Arabidopsis thaliana
ttaccagatttaccgca

SEQ ID NO: 160100 - DNA, 17 bp, Arabidopsis thaliana
ttaccagatttccttcc

SEQ ID NO: 160101 - DNA, 17 bp, Arabidopsis thaliana
ttaccagcaggagcagt

SEQ ID NO: 160102 - DNA, 17 bp, Arabidopsis thaliana
ttaccaggatttgtggt

SEQ ID NO: 160103 - DNA, 17 bp, Arabidopsis thaliana
ttaccaggctcttgctg

SEQ ID NO: 160104 - DNA, 17 bp, Arabidopsis thaliana
ttaccagtgttcagacg

SEQ ID NO: 160105 - DNA, 17 bp, Arabidopsis thaliana
ttaccagtttgttctcc

SEQ ID NO: 160106 - DNA, 17 bp, Arabidopsis thaliana
ttaccatcacgatggat

SEQ ID NO: 160107 - DNA, 17 bp, Arabidopsis thaliana
ttaccatccgtgttcgt

SEQ ID NO: 160108 - DNA, 17 bp, Arabidopsis thaliana
ttaccatcgcagagctc

SEQ ID NO: 160109 - DNA, 17 bp, Arabidopsis thaliana
ttaccatcggagcgtgc

SEQ ID NO: 160110 - DNA, 17 bp, Arabidopsis thaliana
ttaccatcggagcgttc

SEQ ID NO: 160111 - DNA, 17 bp, Arabidopsis thaliana
ttaccattggaccaaca

SEQ ID NO: 160112 - DNA, 17 bp, Arabidopsis thaliana
ttaccatttgtcttttc

SEQ ID NO: 160113 - DNA, 17 bp, Arabidopsis thaliana
ttacccaataaaccgac

SEQ ID NO: 160114 - DNA, 17 bp, Arabidopsis thaliana
ttacccaatcctgacac

SEQ ID NO: 160115 - DNA, 17 bp, Arabidopsis thaliana
ttacccacagaatcgct

SEQ ID NO: 160116 - DNA, 17 bp, Arabidopsis thaliana
ttacccacttggtttgg

SEQ ID NO: 160117 - DNA, 17 bp, Arabidopsis thaliana
ttacccaggttcgagcc

SEQ ID NO: 160118 - DNA, 17 bp, Arabidopsis thaliana
ttacccaggttcgtgcc

SEQ ID NO: 160119 - DNA, 17 bp, Arabidopsis thaliana
ttacccccacaatttga

SEQ ID NO: 160120 - DNA, 17 bp, Arabidopsis thaliana
ttaccccggtggcagct

SEQ ID NO: 160121 - DNA, 17 bp, Arabidopsis thaliana
ttaccccgtcggttgtc

SEQ ID NO: 160122 - DNA, 17 bp, Arabidopsis thaliana
ttacccgacgagcagtc

SEQ ID NO: 160123 - DNA, 17 bp, Arabidopsis thaliana
ttacccgcaggattgtg

SEQ ID NO: 160124 - DNA, 17 bp, Arabidopsis thaliana
ttacccgcggtatcgcg

SEQ ID NO: 160125 - DNA, 17 bp, Arabidopsis thaliana
ttacccgcgttatctac

SEQ ID NO: 160126 - DNA, 17 bp, Arabidopsis thaliana
ttacccgctgagtttaa

SEQ ID NO: 160127 - DNA, 17 bp, Arabidopsis thaliana
ttacccggctgacattg

SEQ ID NO: 160128 - DNA, 17 bp, Arabidopsis thaliana
ttacccggtgcgaccgt

SEQ ID NO: 160129 - DNA, 17 bp, Arabidopsis thaliana
ttacccgtcctgtgatt

SEQ ID NO: 160130 - DNA, 17 bp, Arabidopsis thaliana
ttaccctactgatgccc

SEQ ID NO: 160131 - DNA, 17 bp, Arabidopsis thaliana
ttaccctccgactttag

SEQ ID NO: 160132 - DNA, 17 bp, Arabidopsis thaliana
ttaccctctgtagcaaa

SEQ ID NO: 160133 - DNA, 17 bp, Arabidopsis thaliana
ttaccgaaagatgatgt

SEQ ID NO: 160134 - DNA, 17 bp, Arabidopsis thaliana
ttaccgaactcgattag

SEQ ID NO: 160135 - DNA, 17 bp, Arabidopsis thaliana
ttaccgacgaaatgatt

SEQ ID NO: 160136 - DNA, 17 bp, Arabidopsis thaliana
ttaccgactctcgatta

SEQ ID NO: 160137 - DNA, 17 bp, Arabidopsis thaliana
ttaccgactgaaaacag

SEQ ID NO: 160138 - DNA, 17 bp, Arabidopsis thaliana
ttaccgacttagctcgc

SEQ ID NO: 160139 - DNA, 17 bp, Arabidopsis thaliana
ttaccgagatttactga

SEQ ID NO: 160140 - DNA, 17 bp, Arabidopsis thaliana
ttaccgagctaatgttt

SEQ ID NO: 160141 - DNA, 17 bp, Arabidopsis thaliana
ttaccgatgaaccagct

SEQ ID NO: 160142 - DNA, 17 bp, Arabidopsis thaliana
ttaccgatgtaaccttg

SEQ ID NO: 160143 - DNA, 17 bp, Arabidopsis thaliana
ttaccgattcctgcagg

SEQ ID NO: 160144 - DNA, 17 bp, Arabidopsis thaliana
ttaccgcacgcggttgg

SEQ ID NO: 160145 - DNA, 17 bp, Arabidopsis thaliana
ttaccgcagtttgcgag

SEQ ID NO: 160146 - DNA, 17 bp, Arabidopsis thaliana
ttaccgcagtttgcggg

SEQ ID NO: 160147 - DNA, 17 bp, Arabidopsis thaliana
ttaccgcctctcttgcg

SEQ ID NO: 160148 - DNA, 17 bp, Arabidopsis thaliana
ttaccgcggacggtgtt

SEQ ID NO: 160149 - DNA, 17 bp, Arabidopsis thaliana
ttaccgcgggcaatcaa

SEQ ID NO: 160150 - DNA, 17 bp, Arabidopsis thaliana
ttaccgcgtcagttaac

SEQ ID NO: 160151 - DNA, 17 bp, Arabidopsis thaliana
ttaccgctcaggacagg

SEQ ID NO: 160152 - DNA, 17 bp, Arabidopsis thaliana
ttaccggaatggcaatc

SEQ ID NO: 160153 - DNA, 17 bp, Arabidopsis thaliana
ttaccggacgggttggc

SEQ ID NO: 160154 - DNA, 17 bp, Arabidopsis thaliana
ttaccggactagcaaaa

SEQ ID NO: 160155 - DNA, 17 bp, Arabidopsis thaliana
ttaccgggttggctgat

SEQ ID NO: 160156 - DNA, 17 bp, Arabidopsis thaliana
ttaccggtcaacgcgtc

SEQ ID NO: 160157 - DNA, 17 bp, Arabidopsis thaliana
ttaccgtcatcgctgga

SEQ ID NO: 160158 - DNA, 17 bp, Arabidopsis thaliana
ttaccgtcgctttgcgc

SEQ ID NO: 160159 - DNA, 17 bp, Arabidopsis thaliana
ttaccgtctaagcgtta

SEQ ID NO: 160160 - DNA, 17 bp, Arabidopsis thaliana
ttaccgtgaaactttga

SEQ ID NO: 160161 - DNA, 17 bp, Arabidopsis thaliana
ttaccgtgactcaaact

SEQ ID NO: 160162 - DNA, 17 bp, Arabidopsis thaliana
ttaccgtggcggccccc

SEQ ID NO: 160163 - DNA, 17 bp, Arabidopsis thaliana
ttaccgtggcggcctaa

SEQ ID NO: 160164 - DNA, 17 bp, Arabidopsis thaliana
ttaccgttacgtcggag

SEQ ID NO: 160165 - DNA, 17 bp, Arabidopsis thaliana
ttaccgttccaaagacc

SEQ ID NO: 160166 - DNA, 17 bp, Arabidopsis thaliana
ttaccgtttgttgtctt

SEQ ID NO: 160167 - DNA, 17 bp, Arabidopsis thaliana
ttacctataagcggatc

SEQ ID NO: 160168 - DNA, 17 bp, Arabidopsis thaliana
ttacctattgatgggcg

SEQ ID NO: 160169 - DNA, 17 bp, Arabidopsis thaliana
ttacctatttggcttga

SEQ ID NO: 160170 - DNA, 17 bp, Arabidopsis thaliana
ttacctatttggtttga

SEQ ID NO: 160171 - DNA, 17 bp, Arabidopsis thaliana
ttacctctactcggtac

SEQ ID NO: 160172 - DNA, 17 bp, Arabidopsis thaliana
ttacctctatttgggtt

SEQ ID NO: 160173 - DNA, 17 bp, Arabidopsis thaliana
ttacctctcctccgccg

SEQ ID NO: 160174 - DNA, 17 bp, Arabidopsis thaliana
ttacctctgtactgatt

SEQ ID NO: 160175 - DNA, 17 bp, Arabidopsis thaliana
ttacctgacgcaggcaa

SEQ ID NO: 160176 - DNA, 17 bp, Arabidopsis thaliana
ttacctggatcgggaga

SEQ ID NO: 160177 - DNA, 17 bp, Arabidopsis thaliana
ttacctggctgtgtaag

SEQ ID NO: 160178 - DNA, 17 bp, Arabidopsis thaliana
ttacctggtgacgatat

SEQ ID NO: 160179 - DNA, 17 bp, Arabidopsis thaliana
ttacctgtctgagaagt

SEQ ID NO: 160180 - DNA, 17 bp, Arabidopsis thaliana
ttaccttcggtgcggtg

SEQ ID NO: 160181 - DNA, 17 bp, Arabidopsis thaliana
ttaccttcttgcaattg

SEQ ID NO: 160182 - DNA, 17 bp, Arabidopsis thaliana
ttaccttgccttgtgat

SEQ ID NO: 160183 - DNA, 17 bp, Arabidopsis thaliana
ttaccttggacttcaac

SEQ ID NO: 160184 - DNA, 17 bp, Arabidopsis thaliana
ttaccttgggagttgca

SEQ ID NO: 160185 - DNA, 17 bp, Arabidopsis thaliana
ttacctttacacttggc

SEQ ID NO: 160186 - DNA, 17 bp, Arabidopsis thaliana
ttacgaacccgggctca

SEQ ID NO: 160187 - DNA, 17 bp, Arabidopsis thaliana
ttacgaataggtcctga

SEQ ID NO: 160188 - DNA, 17 bp, Arabidopsis thaliana
ttacgaatggccgacct

SEQ ID NO: 160189 - DNA, 17 bp, Arabidopsis thaliana
ttacgacggactgcgcg

SEQ ID NO: 160190 - DNA, 17 bp, Arabidopsis thaliana
ttacgactggttgatca

SEQ ID NO: 160191 - DNA, 17 bp, Arabidopsis thaliana
ttacgacttcgcagcag

SEQ ID NO: 160192 - DNA, 17 bp, Arabidopsis thaliana
ttacgagacgggttggc

SEQ ID NO: 160193 - DNA, 17 bp, Arabidopsis thaliana
ttacgagactacccgtg

SEQ ID NO: 160194 - DNA, 17 bp, Arabidopsis thaliana
ttacgagactttagcca

SEQ ID NO: 160195 - DNA, 17 bp, Arabidopsis thaliana
ttacgagatttccacgt

SEQ ID NO: 160196 - DNA, 17 bp, Arabidopsis thaliana
ttacgaggttaatgcac

SEQ ID NO: 160197 - DNA, 17 bp, Arabidopsis thaliana
ttacgagtttcggctag

SEQ ID NO: 160198 - DNA, 17 bp, Arabidopsis thaliana
ttacgatctgagattag

SEQ ID NO: 160199 - DNA, 17 bp, Arabidopsis thaliana
ttacgatgtctgcggga

SEQ ID NO: 160200 - DNA, 17 bp, Arabidopsis thaliana
ttacgcaaatgtcatgg

SEQ ID NO: 160201 - DNA, 17 bp, Arabidopsis thaliana
ttacgcaagttttggtg

SEQ ID NO: 160202 - DNA, 17 bp, Arabidopsis thaliana
ttacgccaaattatccg

SEQ ID NO: 160203 - DNA, 17 bp, Arabidopsis thaliana
ttacgccgctaaatccg

SEQ ID NO: 160204 - DNA, 17 bp, Arabidopsis thaliana
ttacgccgttaacttaa

SEQ ID NO: 160205 - DNA, 17 bp, Arabidopsis thaliana
ttacgcctctaagatcc

SEQ ID NO: 160206 - DNA, 17 bp, Arabidopsis thaliana
ttacgcctctcggttga

SEQ ID NO: 160207 - DNA, 17 bp, Arabidopsis thaliana
ttacgcgaccgcggtgc

SEQ ID NO: 160208 - DNA, 17 bp, Arabidopsis thaliana
ttacgcggatcgatcgg

SEQ ID NO: 160209 - DNA, 17 bp, Arabidopsis thaliana
ttacgctagattttgac

SEQ ID NO: 160210 - DNA, 17 bp, Arabidopsis thaliana
ttacgctaggttgttgg

SEQ ID NO: 160211 - DNA, 17 bp, Arabidopsis thaliana
ttacgctatgtccgtaa

SEQ ID NO: 160212 - DNA, 17 bp, Arabidopsis thaliana
ttacgctgctgatgttt

SEQ ID NO: 160213 - DNA, 17 bp, Arabidopsis thaliana
ttacgctgtttcccatt

SEQ ID NO: 160214 - DNA, 17 bp, Arabidopsis thaliana
ttacggaaaatgagcta

SEQ ID NO: 160215 - DNA, 17 bp, Arabidopsis thaliana
ttacggacaattccttt

SEQ ID NO: 160216 - DNA, 17 bp, Arabidopsis thaliana
ttacggaccaattaagg

SEQ ID NO: 160217 - DNA, 17 bp, Arabidopsis thaliana
ttacggactggtcaaac

SEQ ID NO: 160218 - DNA, 17 bp, Arabidopsis thaliana
ttacggactgttcaccc

SEQ ID NO: 160219 - DNA, 17 bp, Arabidopsis thaliana
ttacggactgttcagac

SEQ ID NO: 160220 - DNA, 17 bp, Arabidopsis thaliana
ttacggactgttcagat

SEQ ID NO: 160221 - DNA, 17 bp, Arabidopsis thaliana
ttacggactgttgagtc

SEQ ID NO: 160222 - DNA, 17 bp, Arabidopsis thaliana
ttacggacttcggccca

SEQ ID NO: 160223 - DNA, 17 bp, Arabidopsis thaliana
ttacggactttgaccca

SEQ ID NO: 160224 - DNA, 17 bp, Arabidopsis thaliana
ttacggagctccagcca

SEQ ID NO: 160225 - DNA, 17 bp, Arabidopsis thaliana
ttacggagtgttcagac

SEQ ID NO: 160226 - DNA, 17 bp, Arabidopsis thaliana
ttacggagttgactggt

SEQ ID NO: 160227 - DNA, 17 bp, Arabidopsis thaliana
ttacggatcatatctca

SEQ ID NO: 160228 - DNA, 17 bp, Arabidopsis thaliana
ttacggatggattgggt

SEQ ID NO: 160229 - DNA, 17 bp, Arabidopsis thaliana
ttacggcgcacacgtgt

SEQ ID NO: 160230 - DNA, 17 bp, Arabidopsis thaliana
ttacggcgtttaggtgc

SEQ ID NO: 160231 - DNA, 17 bp, Arabidopsis thaliana
ttacggctcaacgcgtc

SEQ ID NO: 160232 - DNA, 17 bp, Arabidopsis thaliana
ttacgggacaggttggc

SEQ ID NO: 160233 - DNA, 17 bp, Arabidopsis thaliana
ttacgggacggattggc

SEQ ID NO: 160234 - DNA, 17 bp, Arabidopsis thaliana
ttacgggacgggttggc

SEQ ID NO: 160235 - DNA, 17 bp, Arabidopsis thaliana
ttacgggacgggttggt

SEQ ID NO: 160236 - DNA, 17 bp, Arabidopsis thaliana
ttacgggacgggttgtc

SEQ ID NO: 160237 - DNA, 17 bp, Arabidopsis thaliana
ttacgggacgggtttgg

SEQ ID NO: 160238 - DNA, 17 bp, Arabidopsis thaliana
ttacgggattcagcaca

SEQ ID NO: 160239 - DNA, 17 bp, Arabidopsis thaliana
ttacgggattcagccca

SEQ ID NO: 160240 - DNA, 17 bp, Arabidopsis thaliana
ttacgggcttcagcgca

SEQ ID NO: 160241 - DNA, 17 bp, Arabidopsis thaliana
ttacgggcttcgcccca

SEQ ID NO: 160242 - DNA, 17 bp, Arabidopsis thaliana
ttacgggcttcgctcca

SEQ ID NO: 160243 - DNA, 17 bp, Arabidopsis thaliana
ttacgggcttcggccag

SEQ ID NO: 160244 - DNA, 17 bp, Arabidopsis thaliana
ttacgggtcggatttgc

SEQ ID NO: 160245 - DNA, 17 bp, Arabidopsis thaliana
ttacgggtttacgtttt

SEQ ID NO: 160246 - DNA, 17 bp, Arabidopsis thaliana
ttacgggtttcgaccca

SEQ ID NO: 160247 - DNA, 17 bp, Arabidopsis thaliana
ttacggtcggcctaagc

SEQ ID NO: 160248 - DNA, 17 bp, Arabidopsis thaliana
ttacggtgcccaactgc

SEQ ID NO: 160249 - DNA, 17 bp, Arabidopsis thaliana
ttacggtggatacctag

SEQ ID NO: 160250 - DNA, 17 bp, Arabidopsis thaliana
ttacggtggcggcctaa

SEQ ID NO: 160251 - DNA, 17 bp, Arabidopsis thaliana
ttacggtggcggcctga

SEQ ID NO: 160252 - DNA, 17 bp, Arabidopsis thaliana
ttacggtggcggctcaa

SEQ ID NO: 160253 - DNA, 17 bp, Arabidopsis thaliana
ttacggtgtgtacaaag

SEQ ID NO: 160254 - DNA, 17 bp, Arabidopsis thaliana
ttacggttgcggacggt

SEQ ID NO: 160255 - DNA, 17 bp, Arabidopsis thaliana
ttacggtttcggcctag

SEQ ID NO: 160256 - DNA, 17 bp, Arabidopsis thaliana
ttacggttttgacggga

SEQ ID NO: 160257 - DNA, 17 bp, Arabidopsis thaliana
ttacgtaagtttaggct

SEQ ID NO: 160258 - DNA, 17 bp, Arabidopsis thaliana
ttacgtcaagtgcggct

SEQ ID NO: 160259 - DNA, 17 bp, Arabidopsis thaliana
ttacgtcgtttttggct

SEQ ID NO: 160260 - DNA, 17 bp, Arabidopsis thaliana
ttacgtggcggcctaag

SEQ ID NO: 160261 - DNA, 17 bp, Arabidopsis thaliana
ttacgttgctcttggcc

SEQ ID NO: 160262 - DNA, 17 bp, Arabidopsis thaliana
ttacgttggcgggaaaa

SEQ ID NO: 160263 - DNA, 17 bp, Arabidopsis thaliana
ttacgtttttggcggga

SEQ ID NO: 160264 - DNA, 17 bp, Arabidopsis thaliana
ttactaaaaaagattga

SEQ ID NO: 160265 - DNA, 17 bp, Arabidopsis thaliana
ttactaaggtggtggtg

SEQ ID NO: 160266 - DNA, 17 bp, Arabidopsis thaliana
ttactacacgttggtcc

SEQ ID NO: 160267 - DNA, 17 bp, Arabidopsis thaliana
ttactacagaaacggat

SEQ ID NO: 160268 - DNA, 17 bp, Arabidopsis thaliana
ttactacttgggattag

SEQ ID NO: 160269 - DNA, 17 bp, Arabidopsis thaliana
ttactagattttgaccc

SEQ ID NO: 160270 - DNA, 17 bp, Arabidopsis thaliana
ttactagcgatccaaat

SEQ ID NO: 160271 - DNA, 17 bp, Arabidopsis thaliana
ttactaggatgggtgac

SEQ ID NO: 160272 - DNA, 17 bp, Arabidopsis thaliana
ttactaggctcagaact

SEQ ID NO: 160273 - DNA, 17 bp, Arabidopsis thaliana
ttactagggctaaccgg

SEQ ID NO: 160274 - DNA, 17 bp, Arabidopsis thaliana
ttactatcgatccaaac

SEQ ID NO: 160275 - DNA, 17 bp, Arabidopsis thaliana
ttactatcgcacccgct

SEQ ID NO: 160276 - DNA, 17 bp, Arabidopsis thaliana
ttactatcgcacctgct

SEQ ID NO: 160277 - DNA, 17 bp, Arabidopsis thaliana
ttactatcgcactcgct

SEQ ID NO: 160278 - DNA, 17 bp, Arabidopsis thaliana
ttactatctcaccgccc

SEQ ID NO: 160279 - DNA, 17 bp, Arabidopsis thaliana
ttactatcttgggatta

SEQ ID NO: 160280 - DNA, 17 bp, Arabidopsis thaliana
ttactattagctcagtg

SEQ ID NO: 160281 - DNA, 17 bp, Arabidopsis thaliana
ttactattgcacctgct

SEQ ID NO: 160282 - DNA, 17 bp, Arabidopsis thaliana
ttactcaaggattccac

SEQ ID NO: 160283 - DNA, 17 bp, Arabidopsis thaliana
ttactcagtcgttagcg

SEQ ID NO: 160284 - DNA, 17 bp, Arabidopsis thaliana
ttactcagtgagctcgg

SEQ ID NO: 160285 - DNA, 17 bp, Arabidopsis thaliana
ttactcatggtggattc

SEQ ID NO: 160286 - DNA, 17 bp, Arabidopsis thaliana
ttactcattctacacgg

SEQ ID NO: 160287 - DNA, 17 bp, Arabidopsis thaliana
ttactccgacaacctat

SEQ ID NO: 160288 - DNA, 17 bp, Arabidopsis thaliana
ttactccgatcccgaag

SEQ ID NO: 160289 - DNA, 17 bp, Arabidopsis thaliana
ttactccgtgaatcgga

SEQ ID NO: 160290 - DNA, 17 bp, Arabidopsis thaliana
ttactcctaagtgtgcg

SEQ ID NO: 160291 - DNA, 17 bp, Arabidopsis thaliana
ttactcgacagctcaaa

SEQ ID NO: 160292 - DNA, 17 bp, Arabidopsis thaliana
ttactcgacagctccct

SEQ ID NO: 160293 - DNA, 17 bp, Arabidopsis thaliana
ttactcgacagctccgt

SEQ ID NO: 160294 - DNA, 17 bp, Arabidopsis thaliana
ttactcgacagttccgt

SEQ ID NO: 160295 - DNA, 17 bp, Arabidopsis thaliana
ttactcgaccaacagaa

SEQ ID NO: 160296 - DNA, 17 bp, Arabidopsis thaliana
ttactcgaccacaccca

SEQ ID NO: 160297 - DNA, 17 bp, Arabidopsis thaliana
ttactcgaccacccagt

SEQ ID NO: 160298 - DNA, 17 bp, Arabidopsis thaliana
ttactcgaccgcctact

SEQ ID NO: 160299 - DNA, 17 bp, Arabidopsis thaliana
ttactcgacctgatact

SEQ ID NO: 160300 - DNA, 17 bp, Arabidopsis thaliana
ttactcgacctgtcact

SEQ ID NO: 160301 - DNA, 17 bp, Arabidopsis thaliana
ttactcgagggccaaag

SEQ ID NO: 160302 - DNA, 17 bp, Arabidopsis thaliana
ttactcgttcatttgac

SEQ ID NO: 160303 - DNA, 17 bp, Arabidopsis thaliana
ttactcgttgggggacc

SEQ ID NO: 160304 - DNA, 17 bp, Arabidopsis thaliana
ttactctgctgcgccgc

SEQ ID NO: 160305 - DNA, 17 bp, Arabidopsis thaliana
ttactctgctgcgctgc

SEQ ID NO: 160306 - DNA, 17 bp, Arabidopsis thaliana
ttactctggctgcgtcg

SEQ ID NO: 160307 - DNA, 17 bp, Arabidopsis thaliana
ttactctggtttgtatg

SEQ ID NO: 160308 - DNA, 17 bp, Arabidopsis thaliana
ttactcttagactgttt

SEQ ID NO: 160309 - DNA, 17 bp, Arabidopsis thaliana
ttactgacacgtggcac

SEQ ID NO: 160310 - DNA, 17 bp, Arabidopsis thaliana
ttactgatcacaggctg

SEQ ID NO: 160311 - DNA, 17 bp, Arabidopsis thaliana
ttactgatcgaccctgg

SEQ ID NO: 160312 - DNA, 17 bp, Arabidopsis thaliana
ttactgattatcgcctg

SEQ ID NO: 160313 - DNA, 17 bp, Arabidopsis thaliana
ttactgcaacttgtccg

SEQ ID NO: 160314 - DNA, 17 bp, Arabidopsis thaliana
ttactgccgacgttgct

SEQ ID NO: 160315 - DNA, 17 bp, Arabidopsis thaliana
ttactgccggttgatcg

SEQ ID NO: 160316 - DNA, 17 bp, Arabidopsis thaliana
ttactgcgactcagact

SEQ ID NO: 160317 - DNA, 17 bp, Arabidopsis thaliana
ttactgcgggcaatcgg

SEQ ID NO: 160318 - DNA, 17 bp, Arabidopsis thaliana
ttactggaactttggta

SEQ ID NO: 160319 - DNA, 17 bp, Arabidopsis thaliana
ttactggacctgtcact

SEQ ID NO: 160320 - DNA, 17 bp, Arabidopsis thaliana
ttactggattcagccca

SEQ ID NO: 160321 - DNA, 17 bp, Arabidopsis thaliana
ttactggatttaatcgc

SEQ ID NO: 160322 - DNA, 17 bp, Arabidopsis thaliana
ttactggtcgttcgtct

SEQ ID NO: 160323 - DNA, 17 bp, Arabidopsis thaliana
ttactggtttcagcgat

SEQ ID NO: 160324 - DNA, 17 bp, Arabidopsis thaliana
ttactgtaccgcgattg

SEQ ID NO: 160325 - DNA, 17 bp, Arabidopsis thaliana
ttactgtaggcccgtct

SEQ ID NO: 160326 - DNA, 17 bp, Arabidopsis thaliana
ttactgtcaaaatgtcg

SEQ ID NO: 160327 - DNA, 17 bp, Arabidopsis thaliana
ttactgtcgggccaaag

SEQ ID NO: 160328 - DNA, 17 bp, Arabidopsis thaliana
ttacttaaagacgaatc

SEQ ID NO: 160329 - DNA, 17 bp, Arabidopsis thaliana
ttacttaacaggacgcc

SEQ ID NO: 160330 - DNA, 17 bp, Arabidopsis thaliana
ttacttaaccactcgga

SEQ ID NO: 160331 - DNA, 17 bp, Arabidopsis thaliana
ttacttaacccagttca

SEQ ID NO: 160332 - DNA, 17 bp, Arabidopsis thaliana
ttacttaacgacaaacc

SEQ ID NO: 160333 - DNA, 17 bp, Arabidopsis thaliana
ttacttaacggtcgtta

SEQ ID NO: 160334 - DNA, 17 bp, Arabidopsis thaliana
ttacttaactgtggagt

SEQ ID NO: 160335 - DNA, 17 bp, Arabidopsis thaliana
ttacttaaggcgatacc

SEQ ID NO: 160336 - DNA, 17 bp, Arabidopsis thaliana
ttacttaatccgtcagc

SEQ ID NO: 160337 - DNA, 17 bp, Arabidopsis thaliana
ttacttaatcggttcac

SEQ ID NO: 160338 - DNA, 17 bp, Arabidopsis thaliana
ttacttacaagatcggg

SEQ ID NO: 160339 - DNA, 17 bp, Arabidopsis thaliana
ttacttacagactgttc

SEQ ID NO: 160340 - DNA, 17 bp, Arabidopsis thaliana
ttacttacagcggctgt

SEQ ID NO: 160341 - DNA, 17 bp, Arabidopsis thaliana
ttacttacaggttcgaa

SEQ ID NO: 160342 - DNA, 17 bp, Arabidopsis thaliana
ttacttacagtttatca

SEQ ID NO: 160343 - DNA, 17 bp, Arabidopsis thaliana
ttacttaccttcttgca

SEQ ID NO: 160344 - DNA, 17 bp, Arabidopsis thaliana
ttacttacggactgttc

SEQ ID NO: 160345 - DNA, 17 bp, Arabidopsis thaliana
ttacttacgggtttcga

SEQ ID NO: 160346 - DNA, 17 bp, Arabidopsis thaliana
ttacttacggtggcggc

SEQ ID NO: 160347 - DNA, 17 bp, Arabidopsis thaliana
ttacttacttctattct

SEQ ID NO: 160348 - DNA, 17 bp, Arabidopsis thaliana
ttacttagaagatcgcc

SEQ ID NO: 160349 - DNA, 17 bp, Arabidopsis thaliana
ttacttagaccgctttg

SEQ ID NO: 160350 - DNA, 17 bp, Arabidopsis thaliana
ttacttagataaaaggt

SEQ ID NO: 160351 - DNA, 17 bp, Arabidopsis thaliana
ttacttagcagctcaac

SEQ ID NO: 160352 - DNA, 17 bp, Arabidopsis thaliana
ttacttagccgcatcct

SEQ ID NO: 160353 - DNA, 17 bp, Arabidopsis thaliana
ttacttagcggcttggc

SEQ ID NO: 160354 - DNA, 17 bp, Arabidopsis thaliana
ttacttagtcccatcct

SEQ ID NO: 160355 - DNA, 17 bp, Arabidopsis thaliana
ttacttagtcgcaccct

SEQ ID NO: 160356 - DNA, 17 bp, Arabidopsis thaliana
ttacttagtcgcacctg

SEQ ID NO: 160357 - DNA, 17 bp, Arabidopsis thaliana
ttacttagtcgcactgt

SEQ ID NO: 160358 - DNA, 17 bp, Arabidopsis thaliana
ttacttagtcgcatcct

SEQ ID NO: 160359 - DNA, 17 bp, Arabidopsis thaliana
ttacttataggactccg

SEQ ID NO: 160360 - DNA, 17 bp, Arabidopsis thaliana
ttacttatgcgcagagc

SEQ ID NO: 160361 - DNA, 17 bp, Arabidopsis thaliana
ttacttatttttgcggg

SEQ ID NO: 160362 - DNA, 17 bp, Arabidopsis thaliana
ttacttcccctagaatt

SEQ ID NO: 160363 - DNA, 17 bp, Arabidopsis thaliana
ttacttctattctgcac

SEQ ID NO: 160364 - DNA, 17 bp, Arabidopsis thaliana
ttacttctccgcttgtc

SEQ ID NO: 160365 - DNA, 17 bp, Arabidopsis thaliana
ttacttctgggcgatga

SEQ ID NO: 160366 - DNA, 17 bp, Arabidopsis thaliana
ttacttgacacgagtta

SEQ ID NO: 160367 - DNA, 17 bp, Arabidopsis thaliana
ttacttgaccggatggt

SEQ ID NO: 160368 - DNA, 17 bp, Arabidopsis thaliana
ttacttgatacgtaacg

SEQ ID NO: 160369 - DNA, 17 bp, Arabidopsis thaliana
ttacttgcagagagaaa

SEQ ID NO: 160370 - DNA, 17 bp, Arabidopsis thaliana
ttacttgcctcgttttg

SEQ ID NO: 160371 - DNA, 17 bp, Arabidopsis thaliana
ttacttggtgcaggtcg

SEQ ID NO: 160372 - DNA, 17 bp, Arabidopsis thaliana
ttacttggttgtgatcg

SEQ ID NO: 160373 - DNA, 17 bp, Arabidopsis thaliana
ttacttgtcgctgggga

SEQ ID NO: 160374 - DNA, 17 bp, Arabidopsis thaliana
ttacttgtcttaagtca

SEQ ID NO: 160375 - DNA, 17 bp, Arabidopsis thaliana
ttacttgtcttaggtca

SEQ ID NO: 160376 - DNA, 17 bp, Arabidopsis thaliana
ttactttctcttggagt

SEQ ID NO: 160377 - DNA, 17 bp, Arabidopsis thaliana
ttactttggcctatgcg

SEQ ID NO: 160378 - DNA, 17 bp, Arabidopsis thaliana
ttacttttaggttgccg

SEQ ID NO: 160379 - DNA, 17 bp, Arabidopsis thaliana
ttacttttgtcagttgc

SEQ ID NO: 160380 - DNA, 17 bp, Arabidopsis thaliana
ttactttttttgcggga

SEQ ID NO: 160381 - DNA, 17 bp, Arabidopsis thaliana
ttagaaaaacttgtact

SEQ ID NO: 160382 - DNA, 17 bp, Arabidopsis thaliana
ttagaaaccaccactga

SEQ ID NO: 160383 - DNA, 17 bp, Arabidopsis thaliana
ttagaaaccaccactgg

SEQ ID NO: 160384 - DNA, 17 bp, Arabidopsis thaliana
ttagaaacttacaagac

SEQ ID NO: 160385 - DNA, 17 bp, Arabidopsis thaliana
ttagaaagtctgtcaat

SEQ ID NO: 160386 - DNA, 17 bp, Arabidopsis thaliana
ttagaaagtctgtcagt

SEQ ID NO: 160387 - DNA, 17 bp, Arabidopsis thaliana
ttagaaatgcaggcggt

SEQ ID NO: 160388 - DNA, 17 bp, Arabidopsis thaliana
ttagaaccgcattgcat

SEQ ID NO: 160389 - DNA, 17 bp, Arabidopsis thaliana
ttagaagacccaaagga

SEQ ID NO: 160390 - DNA, 17 bp, Arabidopsis thaliana
ttagaagagcgggttaa

SEQ ID NO: 160391 - DNA, 17 bp, Arabidopsis thaliana
ttagaaggccaaactgg

SEQ ID NO: 160392 - DNA, 17 bp, Arabidopsis thaliana
ttagaaggtttaacgtt

SEQ ID NO: 160393 - DNA, 17 bp, Arabidopsis thaliana
ttagaagtcgccggttc

SEQ ID NO: 160394 - DNA, 17 bp, Arabidopsis thaliana
ttagaagtttaggaccc

SEQ ID NO: 160395 - DNA, 17 bp, Arabidopsis thaliana
ttagaatatctgcaagc

SEQ ID NO: 160396 - DNA, 17 bp, Arabidopsis thaliana
ttagaatccgtattggg

SEQ ID NO: 160397 - DNA, 17 bp, Arabidopsis thaliana
ttagaatcgccgtccgg

SEQ ID NO: 160398 - DNA, 17 bp, Arabidopsis thaliana
ttagaatgacatgtggc

SEQ ID NO: 160399 - DNA, 17 bp, Arabidopsis thaliana
ttagaatgcacaaatct

SEQ ID NO: 160400 - DNA, 17 bp, Arabidopsis thaliana
ttagacaaaccactgct

SEQ ID NO: 160401 - DNA, 17 bp, Arabidopsis thaliana
ttagacaacggcgctgt

SEQ ID NO: 160402 - DNA, 17 bp, Arabidopsis thaliana
ttagacacggtgcctgc

SEQ ID NO: 160403 - DNA, 17 bp, Arabidopsis thaliana
ttagacagtttgtttgc

SEQ ID NO: 160404 - DNA, 17 bp, Arabidopsis thaliana
ttagacatgtgcgccgt

SEQ ID NO: 160405 - DNA, 17 bp, Arabidopsis thaliana
ttagaccaaccgcgatt

SEQ ID NO: 160406 - DNA, 17 bp, Arabidopsis thaliana
ttagaccaagtcgctca

SEQ ID NO: 160407 - DNA, 17 bp, Arabidopsis thaliana
ttagaccatctccatcg

SEQ ID NO: 160408 - DNA, 17 bp, Arabidopsis thaliana
ttagaccatctccatct

SEQ ID NO: 160409 - DNA, 17 bp, Arabidopsis thaliana
ttagacccgggttcgtt

SEQ ID NO: 160410 - DNA, 17 bp, Arabidopsis thaliana
ttagaccgctttgtacg

SEQ ID NO: 160411 - DNA, 17 bp, Arabidopsis thaliana
ttagaccgctttgtccg

SEQ ID NO: 160412 - DNA, 17 bp, Arabidopsis thaliana
ttagaccgctttgtcgg

SEQ ID NO: 160413 - DNA, 17 bp, Arabidopsis thaliana
ttagaccggtttagtaa

SEQ ID NO: 160414 - DNA, 17 bp, Arabidopsis thaliana
ttagaccgtcgtgagac

SEQ ID NO: 160415 - DNA, 17 bp, Arabidopsis thaliana
ttagaccgtgacgccga

SEQ ID NO: 160416 - DNA, 17 bp, Arabidopsis thaliana
ttagaccgtgaggccaa

SEQ ID NO: 160417 - DNA, 17 bp, Arabidopsis thaliana
ttagaccgtgaggccga

SEQ ID NO: 160418 - DNA, 17 bp, Arabidopsis thaliana
ttagaccgttttgtccg

SEQ ID NO: 160419 - DNA, 17 bp, Arabidopsis thaliana
ttagacctccaaaattt

SEQ ID NO: 160420 - DNA, 17 bp, Arabidopsis thaliana
ttagacggatgttgcgc

SEQ ID NO: 160421 - DNA, 17 bp, Arabidopsis thaliana
ttagacggtccggacac

SEQ ID NO: 160422 - DNA, 17 bp, Arabidopsis thaliana
ttagacgtgccggagtg

SEQ ID NO: 160423 - DNA, 17 bp, Arabidopsis thaliana
ttagactaccagcctca

SEQ ID NO: 160424 - DNA, 17 bp, Arabidopsis thaliana
ttagactagatcttcac

SEQ ID NO: 160425 - DNA, 17 bp, Arabidopsis thaliana
ttagactcaccagttga

SEQ ID NO: 160426 - DNA, 17 bp, Arabidopsis thaliana
ttagactctcggcaacg

SEQ ID NO: 160427 - DNA, 17 bp, Arabidopsis thaliana
ttagactgtgagcttcc

SEQ ID NO: 160428 - DNA, 17 bp, Arabidopsis thaliana
ttagactgtgggcttcc

SEQ ID NO: 160429 - DNA, 17 bp, Arabidopsis thaliana
ttagacttcagttcgcg

SEQ ID NO: 160430 - DNA, 17 bp, Arabidopsis thaliana
ttagacttcgtcacctg

SEQ ID NO: 160431 - DNA, 17 bp, Arabidopsis thaliana
ttagacttggtgaagat

SEQ ID NO: 160432 - DNA, 17 bp, Arabidopsis thaliana
ttagactttggccaagc

SEQ ID NO: 160433 - DNA, 17 bp, Arabidopsis thaliana
ttagagaattacgggtt

SEQ ID NO: 160434 - DNA, 17 bp, Arabidopsis thaliana
ttagagaccctataagg

SEQ ID NO: 160435 - DNA, 17 bp, Arabidopsis thaliana
ttagagacgacttccgg

SEQ ID NO: 160436 - DNA, 17 bp, Arabidopsis thaliana
ttagagacttctgattc

SEQ ID NO: 160437 - DNA, 17 bp, Arabidopsis thaliana
ttagagaggatctccga

SEQ ID NO: 160438 - DNA, 17 bp, Arabidopsis thaliana
ttagagatcgcctgttg

SEQ ID NO: 160439 - DNA, 17 bp, Arabidopsis thaliana
ttagagatcgcctgttt

SEQ ID NO: 160440 - DNA, 17 bp, Arabidopsis thaliana
ttagagatcgctggaga

SEQ ID NO: 160441 - DNA, 17 bp, Arabidopsis thaliana
ttagagatcgctggagc

SEQ ID NO: 160442 - DNA, 17 bp, Arabidopsis thaliana
ttagagatcgtcggttc

SEQ ID NO: 160443 - DNA, 17 bp, Arabidopsis thaliana
ttagagatggctgagtg

SEQ ID NO: 160444 - DNA, 17 bp, Arabidopsis thaliana
ttagagatgttgcggct

SEQ ID NO: 160445 - DNA, 17 bp, Arabidopsis thaliana
ttagagcactttcaatg

SEQ ID NO: 160446 - DNA, 17 bp, Arabidopsis thaliana
ttagagcagcaccaatg

SEQ ID NO: 160447 - DNA, 17 bp, Arabidopsis thaliana
ttagaggaccaaacgtc

SEQ ID NO: 160448 - DNA, 17 bp, Arabidopsis thaliana
ttagaggcctgtgtcca

SEQ ID NO: 160449 - DNA, 17 bp, Arabidopsis thaliana
ttagaggtcgctggttc

SEQ ID NO: 160450 - DNA, 17 bp, Arabidopsis thaliana
ttagaggtcgtcggttc

SEQ ID NO: 160451 - DNA, 17 bp, Arabidopsis thaliana
ttagaggtcttcatcct

SEQ ID NO: 160452 - DNA, 17 bp, Arabidopsis thaliana
ttagagtagtttggcca

SEQ ID NO: 160453 - DNA, 17 bp, Arabidopsis thaliana
ttagagtctctgtaggt

SEQ ID NO: 160454 - DNA, 17 bp, Arabidopsis thaliana
ttagataaaaggtcgac

SEQ ID NO: 160455 - DNA, 17 bp, Arabidopsis thaliana
ttagataacatggcttc

SEQ ID NO: 160456 - DNA, 17 bp, Arabidopsis thaliana
ttagatcacggagatga

SEQ ID NO: 160457 - DNA, 17 bp, Arabidopsis thaliana
ttagatccacctatcca

SEQ ID NO: 160458 - DNA, 17 bp, Arabidopsis thaliana
ttagatccacctatcct

SEQ ID NO: 160459 - DNA, 17 bp, Arabidopsis thaliana
ttagatccagctccgta

SEQ ID NO: 160460 - DNA, 17 bp, Arabidopsis thaliana
ttagatccgcttctgca

SEQ ID NO: 160461 - DNA, 17 bp, Arabidopsis thaliana
ttagatcctcttcacct

SEQ ID NO: 160462 - DNA, 17 bp, Arabidopsis thaliana
ttagatcgcaggtagct

SEQ ID NO: 160463 - DNA, 17 bp, Arabidopsis thaliana
ttagatgaccatcaaca

SEQ ID NO: 160464 - DNA, 17 bp, Arabidopsis thaliana
ttagatgcctcagtttc

SEQ ID NO: 160465 - DNA, 17 bp, Arabidopsis thaliana
ttagatggctcagatac

SEQ ID NO: 160466 - DNA, 17 bp, Arabidopsis thaliana
ttagatggtaggacggg

SEQ ID NO: 160467 - DNA, 17 bp, Arabidopsis thaliana
ttagatgttctgggccg

SEQ ID NO: 160468 - DNA, 17 bp, Arabidopsis thaliana
ttagattaggaagttta

SEQ ID NO: 160469 - DNA, 17 bp, Arabidopsis thaliana
ttagattaggcgtctgg

SEQ ID NO: 160470 - DNA, 17 bp, Arabidopsis thaliana
ttagattcacgagagac

SEQ ID NO: 160471 - DNA, 17 bp, Arabidopsis thaliana
ttagattcacgcacaaa

SEQ ID NO: 160472 - DNA, 17 bp, Arabidopsis thaliana
ttagattcctgcaccga

SEQ ID NO: 160473 - DNA, 17 bp, Arabidopsis thaliana
ttagattcggttcgggt

SEQ ID NO: 160474 - DNA, 17 bp, Arabidopsis thaliana
ttagattgattttgggt

SEQ ID NO: 160475 - DNA, 17 bp, Arabidopsis thaliana
ttagattgggtagcgaa

SEQ ID NO: 160476 - DNA, 17 bp, Arabidopsis thaliana
ttagattgtaggacgga

SEQ ID NO: 160477 - DNA, 17 bp, Arabidopsis thaliana
ttagattgtgggacggt

SEQ ID NO: 160478 - DNA, 17 bp, Arabidopsis thaliana
ttagattgttgtacccg

SEQ ID NO: 160479 - DNA, 17 bp, Arabidopsis thaliana
ttagatttaccattagg

SEQ ID NO: 160480 - DNA, 17 bp, Arabidopsis thaliana
ttagattttcgccatct

SEQ ID NO: 160481 - DNA, 17 bp, Arabidopsis thaliana
ttagattttgttattgg

SEQ ID NO: 160482 - DNA, 17 bp, Arabidopsis thaliana
ttagcaactttgtaaac

SEQ ID NO: 160483 - DNA, 17 bp, Arabidopsis thaliana
ttagcaagacaattatt

SEQ ID NO: 160484 - DNA, 17 bp, Arabidopsis thaliana
ttagcaccagggttagt

SEQ ID NO: 160485 - DNA, 17 bp, Arabidopsis thaliana
ttagcaccgttgttttg

SEQ ID NO: 160486 - DNA, 17 bp, Arabidopsis thaliana
ttagcacgtctgcctgg

SEQ ID NO: 160487 - DNA, 17 bp, Arabidopsis thaliana
ttagcactaattgtcgt

SEQ ID NO: 160488 - DNA, 17 bp, Arabidopsis thaliana
ttagcagaagcggtgag

SEQ ID NO: 160489 - DNA, 17 bp, Arabidopsis thaliana
ttagcagctcaaccagt

SEQ ID NO: 160490 - DNA, 17 bp, Arabidopsis thaliana
ttagcagctgatacggt

SEQ ID NO: 160491 - DNA, 17 bp, Arabidopsis thaliana
ttagcaggctgaggtct

SEQ ID NO: 160492 - DNA, 17 bp, Arabidopsis thaliana
ttagcagtctaagcgga

SEQ ID NO: 160493 - DNA, 17 bp, Arabidopsis thaliana
ttagcatagaacagttc

SEQ ID NO: 160494 - DNA, 17 bp, Arabidopsis thaliana
ttagcatgttttcggct

SEQ ID NO: 160495 - DNA, 17 bp, Arabidopsis thaliana
ttagcattccttttgca

SEQ ID NO: 160496 - DNA, 17 bp, Arabidopsis thaliana
ttagccaacaccgccgc

SEQ ID NO: 160497 - DNA, 17 bp, Arabidopsis thaliana
ttagccaactaagccca

SEQ ID NO: 160498 - DNA, 17 bp, Arabidopsis thaliana
ttagccacagtccatat

SEQ ID NO: 160499 - DNA, 17 bp, Arabidopsis thaliana
ttagccacatcctgtag

SEQ ID NO: 160500 - DNA, 17 bp, Arabidopsis thaliana
ttagccatcctgtagat

SEQ ID NO: 160501 - DNA, 17 bp, Arabidopsis thaliana
ttagccatgatcgcaaa

SEQ ID NO: 160502 - DNA, 17 bp, Arabidopsis thaliana
ttagccattttgcacga

SEQ ID NO: 160503 - DNA, 17 bp, Arabidopsis thaliana
ttagcccgaggtgcctg

SEQ ID NO: 160504 - DNA, 17 bp, Arabidopsis thaliana
ttagccctgtcatctcg

SEQ ID NO: 160505 - DNA, 17 bp, Arabidopsis thaliana
ttagccctgtttgtttc

SEQ ID NO: 160506 - DNA, 17 bp, Arabidopsis thaliana
ttagccctttgtcgcta

SEQ ID NO: 160507 - DNA, 17 bp, Arabidopsis thaliana
ttagccgattccttgcc

SEQ ID NO: 160508 - DNA, 17 bp, Arabidopsis thaliana
ttagccgcatcctgtag

SEQ ID NO: 160509 - DNA, 17 bp, Arabidopsis thaliana
ttagccgcttctgggag

SEQ ID NO: 160510 - DNA, 17 bp, Arabidopsis thaliana
ttagccggcattccgtc

SEQ ID NO: 160511 - DNA, 17 bp, Arabidopsis thaliana
ttagccggcgttggagg

SEQ ID NO: 160512 - DNA, 17 bp, Arabidopsis thaliana
ttagccgttcgatttcg

SEQ ID NO: 160513 - DNA, 17 bp, Arabidopsis thaliana
ttagcctcagaccacgg

SEQ ID NO: 160514 - DNA, 17 bp, Arabidopsis thaliana
ttagcctcgaacatttg

SEQ ID NO: 160515 - DNA, 17 bp, Arabidopsis thaliana
ttagcctttctctaagc

SEQ ID NO: 160516 - DNA, 17 bp, Arabidopsis thaliana
ttagcgaaaacggcaag

SEQ ID NO: 160517 - DNA, 17 bp, Arabidopsis thaliana
ttagcgaaactcctcac

SEQ ID NO: 160518 - DNA, 17 bp, Arabidopsis thaliana
ttagcgaatcacaaaga

SEQ ID NO: 160519 - DNA, 17 bp, Arabidopsis thaliana
ttagcgaattggttccg

SEQ ID NO: 160520 - DNA, 17 bp, Arabidopsis thaliana
ttagcgacaaagggctg

SEQ ID NO: 160521 - DNA, 17 bp, Arabidopsis thaliana
ttagcgactaccaaggc

SEQ ID NO: 160522 - DNA, 17 bp, Arabidopsis thaliana
ttagcgataagctgaac

SEQ ID NO: 160523 - DNA, 17 bp, Arabidopsis thaliana
ttagcgatctctaacta

SEQ ID NO: 160524 - DNA, 17 bp, Arabidopsis thaliana
ttagcgatgtgccgcgg

SEQ ID NO: 160525 - DNA, 17 bp, Arabidopsis thaliana
ttagcgattgaagtccg

SEQ ID NO: 160526 - DNA, 17 bp, Arabidopsis thaliana
ttagcgcatcctgtaga

SEQ ID NO: 160527 - DNA, 17 bp, Arabidopsis thaliana
ttagcgcatctctagat

SEQ ID NO: 160528 - DNA, 17 bp, Arabidopsis thaliana
ttagcgcatctgtagat

SEQ ID NO: 160529 - DNA, 17 bp, Arabidopsis thaliana
ttagcgcgggcactcac

SEQ ID NO: 160530 - DNA, 17 bp, Arabidopsis thaliana
ttagcgcgtatctttca

SEQ ID NO: 160531 - DNA, 17 bp, Arabidopsis thaliana
ttagcgcgtgagatcga

SEQ ID NO: 160532 - DNA, 17 bp, Arabidopsis thaliana
ttagcgctgcgaccggt

SEQ ID NO: 160533 - DNA, 17 bp, Arabidopsis thaliana
ttagcggaaaatgcggg

SEQ ID NO: 160534 - DNA, 17 bp, Arabidopsis thaliana
ttagcggaacgggtttg

SEQ ID NO: 160535 - DNA, 17 bp, Arabidopsis thaliana
ttagcggcgtcaagtat

SEQ ID NO: 160536 - DNA, 17 bp, Arabidopsis thaliana
ttagcggcttggccggt

SEQ ID NO: 160537 - DNA, 17 bp, Arabidopsis thaliana
ttagcggtcggttgtgg

SEQ ID NO: 160538 - DNA, 17 bp, Arabidopsis thaliana
ttagcggtctcatctat

SEQ ID NO: 160539 - DNA, 17 bp, Arabidopsis thaliana
ttagcggttgaaaacag

SEQ ID NO: 160540 - DNA, 17 bp, Arabidopsis thaliana
ttagcgtgaaatttggt

SEQ ID NO: 160541 - DNA, 17 bp, Arabidopsis thaliana
ttagcgtgtctagccgc

SEQ ID NO: 160542 - DNA, 17 bp, Arabidopsis thaliana
ttagctaaaaacgctca

SEQ ID NO: 160543 - DNA, 17 bp, Arabidopsis thaliana
ttagctaagaaaactcg

SEQ ID NO: 160544 - DNA, 17 bp, Arabidopsis thaliana
ttagctaagaaagttct

SEQ ID NO: 160545 - DNA, 17 bp, Arabidopsis thaliana
ttagctaattcttgatt

SEQ ID NO: 160546 - DNA, 17 bp, Arabidopsis thaliana
ttagctactttcgcaac

SEQ ID NO: 160547 - DNA, 17 bp, Arabidopsis thaliana
ttagctcaagaacaaag

SEQ ID NO: 160548 - DNA, 17 bp, Arabidopsis thaliana
ttagctcagagaccaac

SEQ ID NO: 160549 - DNA, 17 bp, Arabidopsis thaliana
ttagctcaggttctgct

SEQ ID NO: 160550 - DNA, 17 bp, Arabidopsis thaliana
ttagctcgcgaatgatc

SEQ ID NO: 160551 - DNA, 17 bp, Arabidopsis thaliana
ttagctcgcgttgacta

SEQ ID NO: 160552 - DNA, 17 bp, Arabidopsis thaliana
ttagctctcgtctatgg

SEQ ID NO: 160553 - DNA, 17 bp, Arabidopsis thaliana
ttagctctgttctcacg

SEQ ID NO: 160554 - DNA, 17 bp, Arabidopsis thaliana
ttagctgacagaggctc

SEQ ID NO: 160555 - DNA, 17 bp, Arabidopsis thaliana
ttagctgagactgttgg

SEQ ID NO: 160556 - DNA, 17 bp, Arabidopsis thaliana
ttagctgggaaaacttt

SEQ ID NO: 160557 - DNA, 17 bp, Arabidopsis thaliana
ttagctgttcgtttgac

SEQ ID NO: 160558 - DNA, 17 bp, Arabidopsis thaliana
ttagcttagccggcatt

SEQ ID NO: 160559 - DNA, 17 bp, Arabidopsis thaliana
ttagcttcttgtgcact

SEQ ID NO: 160560 - DNA, 17 bp, Arabidopsis thaliana
ttagcttgcagagagaa

SEQ ID NO: 160561 - DNA, 17 bp, Arabidopsis thaliana
ttagcttggaagacctt

SEQ ID NO: 160562 - DNA, 17 bp, Arabidopsis thaliana
ttagcttggaaggctaa

SEQ ID NO: 160563 - DNA, 17 bp, Arabidopsis thaliana
ttagcttgtcacctaag

SEQ ID NO: 160564 - DNA, 17 bp, Arabidopsis thaliana
ttagcttgtgtaggccg

SEQ ID NO: 160565 - DNA, 17 bp, Arabidopsis thaliana
ttagcttgttcgaaatg

SEQ ID NO: 160566 - DNA, 17 bp, Arabidopsis thaliana
ttagctttcccgaggtt

SEQ ID NO: 160567 - DNA, 17 bp, Arabidopsis thaliana
ttagctttggccgagtg

SEQ ID NO: 160568 - DNA, 17 bp, Arabidopsis thaliana
ttaggaaaggtgcaact

SEQ ID NO: 160569 - DNA, 17 bp, Arabidopsis thaliana
ttaggaaatgtttgatg

SEQ ID NO: 160570 - DNA, 17 bp, Arabidopsis thaliana
ttaggaagattctttga

SEQ ID NO: 160571 - DNA, 17 bp, Arabidopsis thaliana
ttaggaatctcccttgg

SEQ ID NO: 160572 - DNA, 17 bp, Arabidopsis thaliana
ttaggaatctgcattct

SEQ ID NO: 160573 - DNA, 17 bp, Arabidopsis thaliana
ttaggacaattcggctt

SEQ ID NO: 160574 - DNA, 17 bp, Arabidopsis thaliana
ttaggacagagacacag

SEQ ID NO: 160575 - DNA, 17 bp, Arabidopsis thaliana
ttaggactcaaacgagc

SEQ ID NO: 160576 - DNA, 17 bp, Arabidopsis thaliana
ttaggagattatgcgaa

SEQ ID NO: 160577 - DNA, 17 bp, Arabidopsis thaliana
ttaggataaggttgcgg

SEQ ID NO: 160578 - DNA, 17 bp, Arabidopsis thaliana
ttaggatcctgttcatt

SEQ ID NO: 160579 - DNA, 17 bp, Arabidopsis thaliana
ttaggatcgggttacgg

SEQ ID NO: 160580 - DNA, 17 bp, Arabidopsis thaliana
ttaggatctttgatgac

SEQ ID NO: 160581 - DNA, 17 bp, Arabidopsis thaliana
ttaggatgctgccatgg

SEQ ID NO: 160582 - DNA, 17 bp, Arabidopsis thaliana
ttaggatgggtcggccg

SEQ ID NO: 160583 - DNA, 17 bp, Arabidopsis thaliana
ttaggattgtgctacat

SEQ ID NO: 160584 - DNA, 17 bp, Arabidopsis thaliana
ttaggcagtgtggtgac

SEQ ID NO: 160585 - DNA, 17 bp, Arabidopsis thaliana
ttaggccaagagtccgt

SEQ ID NO: 160586 - DNA, 17 bp, Arabidopsis thaliana
ttaggccaaggaagttt

SEQ ID NO: 160587 - DNA, 17 bp, Arabidopsis thaliana
ttaggcctcgcgatgga

SEQ ID NO: 160588 - DNA, 17 bp, Arabidopsis thaliana
ttaggcgcatcctgtag

SEQ ID NO: 160589 - DNA, 17 bp, Arabidopsis thaliana
ttaggcgcctactacgt

SEQ ID NO: 160590 - DNA, 17 bp, Arabidopsis thaliana
ttaggcgctaatcagac

SEQ ID NO: 160591 - DNA, 17 bp, Arabidopsis thaliana
ttaggcggtagggcggt

SEQ ID NO: 160592 - DNA, 17 bp, Arabidopsis thaliana
ttaggcggtctcagtcc

SEQ ID NO: 160593 - DNA, 17 bp, Arabidopsis thaliana
ttaggctatctccatca

SEQ ID NO: 160594 - DNA, 17 bp, Arabidopsis thaliana
ttaggctatgccgctat

SEQ ID NO: 160595 - DNA, 17 bp, Arabidopsis thaliana
ttaggctcccaaaggca

SEQ ID NO: 160596 - DNA, 17 bp, Arabidopsis thaliana
ttaggcttacaagatcg

SEQ ID NO: 160597 - DNA, 17 bp, Arabidopsis thaliana
ttaggcttccatgttta

SEQ ID NO: 160598 - DNA, 17 bp, Arabidopsis thaliana
ttagggagacacaggtc

SEQ ID NO: 160599 - DNA, 17 bp, Arabidopsis thaliana
ttagggatttggacgtt

SEQ ID NO: 160600 - DNA, 17 bp, Arabidopsis thaliana
ttagggctctatctggc

SEQ ID NO: 160601 - DNA, 17 bp, Arabidopsis thaliana
ttaggggttctaccgga

SEQ ID NO: 160602 - DNA, 17 bp, Arabidopsis thaliana
ttagggtcaccaaccgc

SEQ ID NO: 160603 - DNA, 17 bp, Arabidopsis thaliana
ttagggtcgatctttac

SEQ ID NO: 160604 - DNA, 17 bp, Arabidopsis thaliana
ttagggtcgccggttcg

SEQ ID NO: 160605 - DNA, 17 bp, Arabidopsis thaliana
ttagggtctctcaagcc

SEQ ID NO: 160606 - DNA, 17 bp, Arabidopsis thaliana
ttagggttactggttcc

SEQ ID NO: 160607 - DNA, 17 bp, Arabidopsis thaliana
ttagggttcatgcggct

SEQ ID NO: 160608 - DNA, 17 bp, Arabidopsis thaliana
ttagggttcctcttaat

SEQ ID NO: 160609 - DNA, 17 bp, Arabidopsis thaliana
ttagggttcgattccgg

SEQ ID NO: 160610 - DNA, 17 bp, Arabidopsis thaliana
ttagggttcgttccccc

SEQ ID NO: 160611 - DNA, 17 bp, Arabidopsis thaliana
ttagggtttctcagatc

SEQ ID NO: 160612 - DNA, 17 bp, Arabidopsis thaliana
ttaggtaatccaggaat

SEQ ID NO: 160613 - DNA, 17 bp, Arabidopsis thaliana
ttaggtcagacctgggc

SEQ ID NO: 160614 - DNA, 17 bp, Arabidopsis thaliana
ttaggtccacgtcaatt

SEQ ID NO: 160615 - DNA, 17 bp, Arabidopsis thaliana
ttaggtcctgtttgttt

SEQ ID NO: 160616 - DNA, 17 bp, Arabidopsis thaliana
ttaggtccttaccctac

SEQ ID NO: 160617 - DNA, 17 bp, Arabidopsis thaliana
ttaggtcgcatcctgta

SEQ ID NO: 160618 - DNA, 17 bp, Arabidopsis thaliana
ttaggtgaacctgcgga

SEQ ID NO: 160619 - DNA, 17 bp, Arabidopsis thaliana
ttaggtgatcatccgca

SEQ ID NO: 160620 - DNA, 17 bp, Arabidopsis thaliana
ttaggtgcagctcttcc

SEQ ID NO: 160621 - DNA, 17 bp, Arabidopsis thaliana
ttaggtgcgctgacgtg

SEQ ID NO: 160622 - DNA, 17 bp, Arabidopsis thaliana
ttaggtgcttcgtagcc

SEQ ID NO: 160623 - DNA, 17 bp, Arabidopsis thaliana
ttaggtgtcaatccaaa

SEQ ID NO: 160624 - DNA, 17 bp, Arabidopsis thaliana
ttaggttagatcccttc

SEQ ID NO: 160625 - DNA, 17 bp, Arabidopsis thaliana
ttaggttattggcccgt

SEQ ID NO: 160626 - DNA, 17 bp, Arabidopsis thaliana
ttaggttcaaacactag

SEQ ID NO: 160627 - DNA, 17 bp, Arabidopsis thaliana
ttaggttcaaatcctac

SEQ ID NO: 160628 - DNA, 17 bp, Arabidopsis thaliana
ttaggttccacgacgag

SEQ ID NO: 160629 - DNA, 17 bp, Arabidopsis thaliana
ttaggttccccctacct

SEQ ID NO: 160630 - DNA, 17 bp, Arabidopsis thaliana
ttaggttcgtaacgaca

SEQ ID NO: 160631 - DNA, 17 bp, Arabidopsis thaliana
ttaggttctaacgttag

SEQ ID NO: 160632 - DNA, 17 bp, Arabidopsis thaliana
ttaggttctgagccgaa

SEQ ID NO: 160633 - DNA, 17 bp, Arabidopsis thaliana
ttaggttctggatccct

SEQ ID NO: 160634 - DNA, 17 bp, Arabidopsis thaliana
ttaggttgaccacttga

SEQ ID NO: 160635 - DNA, 17 bp, Arabidopsis thaliana
ttaggttgatcgtgctt

SEQ ID NO: 160636 - DNA, 17 bp, Arabidopsis thaliana
ttaggttggaagtccac

SEQ ID NO: 160637 - DNA, 17 bp, Arabidopsis thaliana
ttaggttggttatcgga

SEQ ID NO: 160638 - DNA, 17 bp, Arabidopsis thaliana
ttaggtttactcggttg

SEQ ID NO: 160639 - DNA, 17 bp, Arabidopsis thaliana
ttaggtttctctctgtg

SEQ ID NO: 160640 - DNA, 17 bp, Arabidopsis thaliana
ttaggttttaccggatt

SEQ ID NO: 160641 - DNA, 17 bp, Arabidopsis thaliana
ttaggttttgagtaagt

SEQ ID NO: 160642 - DNA, 17 bp, Arabidopsis thaliana
ttagtaaacccgtggat

SEQ ID NO: 160643 - DNA, 17 bp, Arabidopsis thaliana
ttagtaaaccgtggacg

SEQ ID NO: 160644 - DNA, 17 bp, Arabidopsis thaliana
ttagtaacggcgagcga

SEQ ID NO: 160645 - DNA, 17 bp, Arabidopsis thaliana
ttagtaactcacgagat

SEQ ID NO: 160646 - DNA, 17 bp, Arabidopsis thaliana
ttagtagcatcctgtag

SEQ ID NO: 160647 - DNA, 17 bp, Arabidopsis thaliana
ttagtagccgtttgcaa

SEQ ID NO: 160648 - DNA, 17 bp, Arabidopsis thaliana
ttagtagccttaggcca

SEQ ID NO: 160649 - DNA, 17 bp, Arabidopsis thaliana
ttagtaggcccaggata

SEQ ID NO: 160650 - DNA, 17 bp, Arabidopsis thaliana
ttagtattccgttcgcg

SEQ ID NO: 160651 - DNA, 17 bp, Arabidopsis thaliana
ttagtattgacccaaac

SEQ ID NO: 160652 - DNA, 17 bp, Arabidopsis thaliana
ttagtcaactcacgact

SEQ ID NO: 160653 - DNA, 17 bp, Arabidopsis thaliana
ttagtcacaagcgctgc

SEQ ID NO: 160654 - DNA, 17 bp, Arabidopsis thaliana
ttagtcacaccgaagga

SEQ ID NO: 160655 - DNA, 17 bp, Arabidopsis thaliana
ttagtcacatcctggat

SEQ ID NO: 160656 - DNA, 17 bp, Arabidopsis thaliana
ttagtcacatcctgtag

SEQ ID NO: 160657 - DNA, 17 bp, Arabidopsis thaliana
ttagtcacatctgtaga

SEQ ID NO: 160658 - DNA, 17 bp, Arabidopsis thaliana
ttagtcaggtgtggttg

SEQ ID NO: 160659 - DNA, 17 bp, Arabidopsis thaliana
ttagtcatcctgtagat

SEQ ID NO: 160660 - DNA, 17 bp, Arabidopsis thaliana
ttagtcatcctgtgatg

SEQ ID NO: 160661 - DNA, 17 bp, Arabidopsis thaliana
ttagtcatcggctgtac

SEQ ID NO: 160662 - DNA, 17 bp, Arabidopsis thaliana
ttagtcatcggctgtgc

SEQ ID NO: 160663 - DNA, 17 bp, Arabidopsis thaliana
ttagtcatctcgaccgt

SEQ ID NO: 160664 - DNA, 17 bp, Arabidopsis thaliana
ttagtcattcaatcgca

SEQ ID NO: 160665 - DNA, 17 bp, Arabidopsis thaliana
ttagtccacctgtagat

SEQ ID NO: 160666 - DNA, 17 bp, Arabidopsis thaliana
ttagtccatccgtagat

SEQ ID NO: 160667 - DNA, 17 bp, Arabidopsis thaliana
ttagtccatcctgtaga

SEQ ID NO: 160668 - DNA, 17 bp, Arabidopsis thaliana
ttagtccatctcatttt

SEQ ID NO: 160669 - DNA, 17 bp, Arabidopsis thaliana
ttagtccatctgtagaa

SEQ ID NO: 160670 - DNA, 17 bp, Arabidopsis thaliana
ttagtccatgaggatgt

SEQ ID NO: 160671 - DNA, 17 bp, Arabidopsis thaliana
ttagtcccagttccgaa

SEQ ID NO: 160672 - DNA, 17 bp, Arabidopsis thaliana
ttagtcccatcctgtag

SEQ ID NO: 160673 - DNA, 17 bp, Arabidopsis thaliana
ttagtccgcaatcctgt

SEQ ID NO: 160674 - DNA, 17 bp, Arabidopsis thaliana
ttagtcctggatgttcg

SEQ ID NO: 160675 - DNA, 17 bp, Arabidopsis thaliana
ttagtccttcacgaccc

SEQ ID NO: 160676 - DNA, 17 bp, Arabidopsis thaliana
ttagtcgacctgtagat

SEQ ID NO: 160677 - DNA, 17 bp, Arabidopsis thaliana
ttagtcgatcctgtaga

SEQ ID NO: 160678 - DNA, 17 bp, Arabidopsis thaliana
ttagtcgattaatcacg

SEQ ID NO: 160679 - DNA, 17 bp, Arabidopsis thaliana
ttagtcgcaccctgtag

SEQ ID NO: 160680 - DNA, 17 bp, Arabidopsis thaliana
ttagtcgcaccctgtga

SEQ ID NO: 160681 - DNA, 17 bp, Arabidopsis thaliana
ttagtcgcacctgtaga

SEQ ID NO: 160682 - DNA, 17 bp, Arabidopsis thaliana
ttagtcgcacgctgtag

SEQ ID NO: 160683 - DNA, 17 bp, Arabidopsis thaliana
ttagtcgcactgtagat

SEQ ID NO: 160684 - DNA, 17 bp, Arabidopsis thaliana
ttagtcgcactgtagga

SEQ ID NO: 160685 - DNA, 17 bp, Arabidopsis thaliana
ttagtcgcagcctgtag

SEQ ID NO: 160686 - DNA, 17 bp, Arabidopsis thaliana
ttagtcgcaggcagaat

SEQ ID NO: 160687 - DNA, 17 bp, Arabidopsis thaliana
ttagtcgcagtgtagat

SEQ ID NO: 160688 - DNA, 17 bp, Arabidopsis thaliana
ttagtcgcatccagtag

SEQ ID NO: 160689 - DNA, 17 bp, Arabidopsis thaliana
ttagtcgcatcccagat

SEQ ID NO: 160690 - DNA, 17 bp, Arabidopsis thaliana
ttagtcgcatcccgtag

SEQ ID NO: 160691 - DNA, 17 bp, Arabidopsis thaliana
ttagtcgcatccctgat

SEQ ID NO: 160692 - DNA, 17 bp, Arabidopsis thaliana
ttagtcgcatccggtag

SEQ ID NO: 160693 - DNA, 17 bp, Arabidopsis thaliana
ttagtcgcatccgtaga

SEQ ID NO: 160694 - DNA, 17 bp, Arabidopsis thaliana
ttagtcgcatcctagat

SEQ ID NO: 160695 - DNA, 17 bp, Arabidopsis thaliana
ttagtcgcatcctataa

SEQ ID NO: 160696 - DNA, 17 bp, Arabidopsis thaliana
ttagtcgcatcctatag

SEQ ID NO: 160697 - DNA, 17 bp, Arabidopsis thaliana
ttagtcgcatcctctac

SEQ ID NO: 160698 - DNA, 17 bp, Arabidopsis thaliana
ttagtcgcatcctgaag

SEQ ID NO: 160699 - DNA, 17 bp, Arabidopsis thaliana
ttagtcgcatcctgaga

SEQ ID NO: 160700 - DNA, 17 bp, Arabidopsis thaliana
ttagtcgcatcctgatt

SEQ ID NO: 160701 - DNA, 17 bp, Arabidopsis thaliana
ttagtcgcatcctggag

SEQ ID NO: 160702 - DNA, 17 bp, Arabidopsis thaliana
ttagtcgcatcctggat

SEQ ID NO: 160703 - DNA, 17 bp, Arabidopsis thaliana
ttagtcgcatcctgtaa

SEQ ID NO: 160704 - DNA, 17 bp, Arabidopsis thaliana
ttagtcgcatcctgtac

SEQ ID NO: 160705 - DNA, 17 bp, Arabidopsis thaliana
ttagtcgcatcctgtag

SEQ ID NO: 160706 - DNA, 17 bp, Arabidopsis thaliana
ttagtcgcatcctgtat

SEQ ID NO: 160707 - DNA, 17 bp, Arabidopsis thaliana
ttagtcgcatcctgtcg

SEQ ID NO: 160708 - DNA, 17 bp, Arabidopsis thaliana
ttagtcgcatcctgtct

SEQ ID NO: 160709 - DNA, 17 bp, Arabidopsis thaliana
ttagtcgcatcctgtga

SEQ ID NO: 160710 - DNA, 17 bp, Arabidopsis thaliana
ttagtcgcatcctgtgt

SEQ ID NO: 160711 - DNA, 17 bp, Arabidopsis thaliana
ttagtcgcatcctgtta

SEQ ID NO: 160712 - DNA, 17 bp, Arabidopsis thaliana
ttagtcgcatcctgttt

SEQ ID NO: 160713 - DNA, 17 bp, Arabidopsis thaliana
ttagtcgcatcctttag

SEQ ID NO: 160714 - DNA, 17 bp, Arabidopsis thaliana
ttagtcgcatctgtaga

SEQ ID NO: 160715 - DNA, 17 bp, Arabidopsis thaliana
ttagtcgcatctgtagg

SEQ ID NO: 160716 - DNA, 17 bp, Arabidopsis thaliana
ttagtcgcatcttgata

SEQ ID NO: 160717 - DNA, 17 bp, Arabidopsis thaliana
ttagtcgcatcttgtag

SEQ ID NO: 160718 - DNA, 17 bp, Arabidopsis thaliana
ttagtcgcattcctgta

SEQ ID NO: 160719 - DNA, 17 bp, Arabidopsis thaliana
ttagtcgcattcgtaga

SEQ ID NO: 160720 - DNA, 17 bp, Arabidopsis thaliana
ttagtcgcattctgtag

SEQ ID NO: 160721 - DNA, 17 bp, Arabidopsis thaliana
ttagtcgcatttgtaga

SEQ ID NO: 160722 - DNA, 17 bp, Arabidopsis thaliana
ttagtcgccaggagtga

SEQ ID NO: 160723 - DNA, 17 bp, Arabidopsis thaliana
ttagtcgccatctgtag

SEQ ID NO: 160724 - DNA, 17 bp, Arabidopsis thaliana
ttagtcgccctgagatg

SEQ ID NO: 160725 - DNA, 17 bp, Arabidopsis thaliana
ttagtcgccctgtagat

SEQ ID NO: 160726 - DNA, 17 bp, Arabidopsis thaliana
ttagtcgcctcctgtag

SEQ ID NO: 160727 - DNA, 17 bp, Arabidopsis thaliana
ttagtcgcctgtagatg

SEQ ID NO: 160728 - DNA, 17 bp, Arabidopsis thaliana
ttagtcgcgcctgtaga

SEQ ID NO: 160729 - DNA, 17 bp, Arabidopsis thaliana
ttagtcgcgctgtagat

SEQ ID NO: 160730 - DNA, 17 bp, Arabidopsis thaliana
ttagtcgcgtcctgtag

SEQ ID NO: 160731 - DNA, 17 bp, Arabidopsis thaliana
ttagtcgctcaacggtt

SEQ ID NO: 160732 - DNA, 17 bp, Arabidopsis thaliana
ttagtcgctcctgtaga

SEQ ID NO: 160733 - DNA, 17 bp, Arabidopsis thaliana
ttagtcgctgaaatttt

SEQ ID NO: 160734 - DNA, 17 bp, Arabidopsis thaliana
ttagtcgctgcttttgg

SEQ ID NO: 160735 - DNA, 17 bp, Arabidopsis thaliana
ttagtcgctgcttttgt

SEQ ID NO: 160736 - DNA, 17 bp, Arabidopsis thaliana
ttagtcgctggttttag

SEQ ID NO: 160737 - DNA, 17 bp, Arabidopsis thaliana
ttagtcgcttcctgtag

SEQ ID NO: 160738 - DNA, 17 bp, Arabidopsis thaliana
ttagtcggagtagagtt

SEQ ID NO: 160739 - DNA, 17 bp, Arabidopsis thaliana
ttagtcggcacctgtag

SEQ ID NO: 160740 - DNA, 17 bp, Arabidopsis thaliana
ttagtcggcatcctgta

SEQ ID NO: 160741 - DNA, 17 bp, Arabidopsis thaliana
ttagtcgggattgttca

SEQ ID NO: 160742 - DNA, 17 bp, Arabidopsis thaliana
ttagtcggttgtggttg

SEQ ID NO: 160743 - DNA, 17 bp, Arabidopsis thaliana
ttagtcgtatcctgtag

SEQ ID NO: 160744 - DNA, 17 bp, Arabidopsis thaliana
ttagtcgtcctgtagat

SEQ ID NO: 160745 - DNA, 17 bp, Arabidopsis thaliana
ttagtcgtgctacttgg

SEQ ID NO: 160746 - DNA, 17 bp, Arabidopsis thaliana
ttagtcgttgctcagtc

SEQ ID NO: 160747 - DNA, 17 bp, Arabidopsis thaliana
ttagtctcatcctgtag

SEQ ID NO: 160748 - DNA, 17 bp, Arabidopsis thaliana
ttagtctccacgggatt

SEQ ID NO: 160749 - DNA, 17 bp, Arabidopsis thaliana
ttagtctcgtcgacggc

SEQ ID NO: 160750 - DNA, 17 bp, Arabidopsis thaliana
ttagtctcgtggcagtc

SEQ ID NO: 160751 - DNA, 17 bp, Arabidopsis thaliana
ttagtctctacttttta

SEQ ID NO: 160752 - DNA, 17 bp, Arabidopsis thaliana
ttagtctctcttgcgat

SEQ ID NO: 160753 - DNA, 17 bp, Arabidopsis thaliana
ttagtctctgggttttg

SEQ ID NO: 160754 - DNA, 17 bp, Arabidopsis thaliana
ttagtctgagttacgga

SEQ ID NO: 160755 - DNA, 17 bp, Arabidopsis thaliana
ttagtctgcctgggtgt

SEQ ID NO: 160756 - DNA, 17 bp, Arabidopsis thaliana
ttagtctgtctcctggt

SEQ ID NO: 160757 - DNA, 17 bp, Arabidopsis thaliana
ttagtctttcgaatcgc

SEQ ID NO: 160758 - DNA, 17 bp, Arabidopsis thaliana
ttagtctttcgattcgc

SEQ ID NO: 160759 - DNA, 17 bp, Arabidopsis thaliana
ttagtgacaacttgatg

SEQ ID NO: 160760 - DNA, 17 bp, Arabidopsis thaliana
ttagtgacacgtgtaag

SEQ ID NO: 160761 - DNA, 17 bp, Arabidopsis thaliana
ttagtgacgcgcatgaa

SEQ ID NO: 160762 - DNA, 17 bp, Arabidopsis thaliana
ttagtgagacgctataa

SEQ ID NO: 160763 - DNA, 17 bp, Arabidopsis thaliana
ttagtgagattgcacag

SEQ ID NO: 160764 - DNA, 17 bp, Arabidopsis thaliana
ttagtgaggtgtatcgg

SEQ ID NO: 160765 - DNA, 17 bp, Arabidopsis thaliana
ttagtgatccgacggtg

SEQ ID NO: 160766 - DNA, 17 bp, Arabidopsis thaliana
ttagtgattcccgaatt

SEQ ID NO: 160767 - DNA, 17 bp, Arabidopsis thaliana
ttagtgcaccctctgtc

SEQ ID NO: 160768 - DNA, 17 bp, Arabidopsis thaliana
ttagtgcagtgatcgtt

SEQ ID NO: 160769 - DNA, 17 bp, Arabidopsis thaliana
ttagtgcatcctgtaga

SEQ ID NO: 160770 - DNA, 17 bp, Arabidopsis thaliana
ttagtgcatcctttaga

SEQ ID NO: 160771 - DNA, 17 bp, Arabidopsis thaliana
ttagtgccaaattgtcc

SEQ ID NO: 160772 - DNA, 17 bp, Arabidopsis thaliana
ttagtgctaaaacccga

SEQ ID NO: 160773 - DNA, 17 bp, Arabidopsis thaliana
ttagtggacatgacctt

SEQ ID NO: 160774 - DNA, 17 bp, Arabidopsis thaliana
ttagtggacttctcgcg

SEQ ID NO: 160775 - DNA, 17 bp, Arabidopsis thaliana
ttagtggcatcctggat

SEQ ID NO: 160776 - DNA, 17 bp, Arabidopsis thaliana
ttagtggccttacagct

SEQ ID NO: 160777 - DNA, 17 bp, Arabidopsis thaliana
ttagtggctccattacc

SEQ ID NO: 160778 - DNA, 17 bp, Arabidopsis thaliana
ttagtgggtcgtcatgg

SEQ ID NO: 160779 - DNA, 17 bp, Arabidopsis thaliana
ttagtgtaccggaattg

SEQ ID NO: 160780 - DNA, 17 bp, Arabidopsis thaliana
ttagtgtcacaggtgat

SEQ ID NO: 160781 - DNA, 17 bp, Arabidopsis thaliana
ttagttactatcgcacc

SEQ ID NO: 160782 - DNA, 17 bp, Arabidopsis thaliana
ttagttactctcagctt

SEQ ID NO: 160783 - DNA, 17 bp, Arabidopsis thaliana
ttagttagccacttttc

SEQ ID NO: 160784 - DNA, 17 bp, Arabidopsis thaliana
ttagttagtcaggttta

SEQ ID NO: 160785 - DNA, 17 bp, Arabidopsis thaliana
ttagttagtcgcatcct

SEQ ID NO: 160786 - DNA, 17 bp, Arabidopsis thaliana
ttagttccatcccgctg

SEQ ID NO: 160787 - DNA, 17 bp, Arabidopsis thaliana
ttagttccatcccgctt

SEQ ID NO: 160788 - DNA, 17 bp, Arabidopsis thaliana
ttagttcgcatcctgta

SEQ ID NO: 160789 - DNA, 17 bp, Arabidopsis thaliana
ttagttcgccacttttc

SEQ ID NO: 160790 - DNA, 17 bp, Arabidopsis thaliana
ttagttctgttaaattg

SEQ ID NO: 160791 - DNA, 17 bp, Arabidopsis thaliana
ttagttgaacggatggt

SEQ ID NO: 160792 - DNA, 17 bp, Arabidopsis thaliana
ttagttgaagaactggc

SEQ ID NO: 160793 - DNA, 17 bp, Arabidopsis thaliana
ttagttgaccagatggt

SEQ ID NO: 160794 - DNA, 17 bp, Arabidopsis thaliana
ttagttgacccctattc

SEQ ID NO: 160795 - DNA, 17 bp, Arabidopsis thaliana
ttagttgaccggatggt

SEQ ID NO: 160796 - DNA, 17 bp, Arabidopsis thaliana
ttagttgacggaattgt

SEQ ID NO: 160797 - DNA, 17 bp, Arabidopsis thaliana
ttagttgactgtggatt

SEQ ID NO: 160798 - DNA, 17 bp, Arabidopsis thaliana
ttagttgcactgttcca

SEQ ID NO: 160799 - DNA, 17 bp, Arabidopsis thaliana
ttagttgcatcctgtag

SEQ ID NO: 160800 - DNA, 17 bp, Arabidopsis thaliana
ttagttgccaccgttga

SEQ ID NO: 160801 - DNA, 17 bp, Arabidopsis thaliana
ttagttgccacctttga

SEQ ID NO: 160802 - DNA, 17 bp, Arabidopsis thaliana
ttagttggtggagcgat

SEQ ID NO: 160803 - DNA, 17 bp, Arabidopsis thaliana
ttagttgtccgctgact

SEQ ID NO: 160804 - DNA, 17 bp, Arabidopsis thaliana
ttagttgtctgccgact

SEQ ID NO: 160805 - DNA, 17 bp, Arabidopsis thaliana
ttagttgtcttaggcta

SEQ ID NO: 160806 - DNA, 17 bp, Arabidopsis thaliana
ttagtttacggctttgt

SEQ ID NO: 160807 - DNA, 17 bp, Arabidopsis thaliana
ttagtttatttggcatg

SEQ ID NO: 160808 - DNA, 17 bp, Arabidopsis thaliana
ttagtttccgtctgggt

SEQ ID NO: 160809 - DNA, 17 bp, Arabidopsis thaliana
ttagtttcgtcccaagc

SEQ ID NO: 160810 - DNA, 17 bp, Arabidopsis thaliana
ttagtttcgttccaagc

SEQ ID NO: 160811 - DNA, 17 bp, Arabidopsis thaliana
ttagtttgcggagaagc

SEQ ID NO: 160812 - DNA, 17 bp, Arabidopsis thaliana
ttagtttgcggttgcgg

SEQ ID NO: 160813 - DNA, 17 bp, Arabidopsis thaliana
ttagtttggattccaca

SEQ ID NO: 160814 - DNA, 17 bp, Arabidopsis thaliana
ttagtttggctaaggca

SEQ ID NO: 160815 - DNA, 17 bp, Arabidopsis thaliana
ttagttttaccctactg

SEQ ID NO: 160816 - DNA, 17 bp, Arabidopsis thaliana
ttagttttagctgagac

SEQ ID NO: 160817 - DNA, 17 bp, Arabidopsis thaliana
ttagttttccattggac

SEQ ID NO: 160818 - DNA, 17 bp, Arabidopsis thaliana
ttagttttcgcatgtgc

SEQ ID NO: 160819 - DNA, 17 bp, Arabidopsis thaliana
ttagttttgcctgttgg

SEQ ID NO: 160820 - DNA, 17 bp, Arabidopsis thaliana
ttataacctcggtgatt

SEQ ID NO: 160821 - DNA, 17 bp, Arabidopsis thaliana
ttataagctgtggttgc

SEQ ID NO: 160822 - DNA, 17 bp, Arabidopsis thaliana
ttataagtgccacgtgt

SEQ ID NO: 160823 - DNA, 17 bp, Arabidopsis thaliana
ttataagtttgtccttg

SEQ ID NO: 160824 - DNA, 17 bp, Arabidopsis thaliana
ttataataaccaccgag

SEQ ID NO: 160825 - DNA, 17 bp, Arabidopsis thaliana
ttataattaccacagag

SEQ ID NO: 160826 - DNA, 17 bp, Arabidopsis thaliana
ttataattaccaccgag

SEQ ID NO: 160827 - DNA, 17 bp, Arabidopsis thaliana
ttatacagtttcagttt

SEQ ID NO: 160828 - DNA, 17 bp, Arabidopsis thaliana
ttatacatcaacttcgt

SEQ ID NO: 160829 - DNA, 17 bp, Arabidopsis thaliana
ttataccagaacctgtc

SEQ ID NO: 160830 - DNA, 17 bp, Arabidopsis thaliana
ttatacccacggccgaa

SEQ ID NO: 160831 - DNA, 17 bp, Arabidopsis thaliana
ttataccgcaacccgat

SEQ ID NO: 160832 - DNA, 17 bp, Arabidopsis thaliana
ttatacggagagagtta

SEQ ID NO: 160833 - DNA, 17 bp, Arabidopsis thaliana
ttatacggcggagatgg

SEQ ID NO: 160834 - DNA, 17 bp, Arabidopsis thaliana
ttatacgggcaagtggc

SEQ ID NO: 160835 - DNA, 17 bp, Arabidopsis thaliana
ttatacgttcaagcccg

SEQ ID NO: 160836 - DNA, 17 bp, Arabidopsis thaliana
ttatactgaacgattct

SEQ ID NO: 160837 - DNA, 17 bp, Arabidopsis thaliana
ttatagccgcttgccag

SEQ ID NO: 160838 - DNA, 17 bp, Arabidopsis thaliana
ttatagccgttcgccaa

SEQ ID NO: 160839 - DNA, 17 bp, Arabidopsis thaliana
ttatagccgttcgccag

SEQ ID NO: 160840 - DNA, 17 bp, Arabidopsis thaliana
ttataggactccgctgg

SEQ ID NO: 160841 - DNA, 17 bp, Arabidopsis thaliana
ttatagtcgcatcctgt

SEQ ID NO: 160842 - DNA, 17 bp, Arabidopsis thaliana
ttatagtcgtcagaaca

SEQ ID NO: 160843 - DNA, 17 bp, Arabidopsis thaliana
ttatagtcgttcgccag

SEQ ID NO: 160844 - DNA, 17 bp, Arabidopsis thaliana
ttatatccgagaacaat

SEQ ID NO: 160845 - DNA, 17 bp, Arabidopsis thaliana
ttatatgctcaagcccg

SEQ ID NO: 160846 - DNA, 17 bp, Arabidopsis thaliana
ttatatgggttttgggt

SEQ ID NO: 160847 - DNA, 17 bp, Arabidopsis thaliana
ttatcaacactgaattt

SEQ ID NO: 160848 - DNA, 17 bp, Arabidopsis thaliana
ttatcaactggtgactg

SEQ ID NO: 160849 - DNA, 17 bp, Arabidopsis thaliana
ttatcaatgaggccact

SEQ ID NO: 160850 - DNA, 17 bp, Arabidopsis thaliana
ttatcaattcgaccctt

SEQ ID NO: 160851 - DNA, 17 bp, Arabidopsis thaliana
ttatcacagcagtgact

SEQ ID NO: 160852 - DNA, 17 bp, Arabidopsis thaliana
ttatcacagtctaacga

SEQ ID NO: 160853 - DNA, 17 bp, Arabidopsis thaliana
ttatcaccaaatctgac

SEQ ID NO: 160854 - DNA, 17 bp, Arabidopsis thaliana
ttatcactcttgtgttg

SEQ ID NO: 160855 - DNA, 17 bp, Arabidopsis thaliana
ttatcactgggccaaca

SEQ ID NO: 160856 - DNA, 17 bp, Arabidopsis thaliana
ttatcagaaccgccgtg

SEQ ID NO: 160857 - DNA, 17 bp, Arabidopsis thaliana
ttatcagaagacctgca

SEQ ID NO: 160858 - DNA, 17 bp, Arabidopsis thaliana
ttatcagcacgctctaa

SEQ ID NO: 160859 - DNA, 17 bp, Arabidopsis thaliana
ttatcagccctttgtcg

SEQ ID NO: 160860 - DNA, 17 bp, Arabidopsis thaliana
ttatcagcttcagttga

SEQ ID NO: 160861 - DNA, 17 bp, Arabidopsis thaliana
ttatcaggctgtaattg

SEQ ID NO: 160862 - DNA, 17 bp, Arabidopsis thaliana
ttatcagggagtgagac

SEQ ID NO: 160863 - DNA, 17 bp, Arabidopsis thaliana
ttatcaggtggggagtt

SEQ ID NO: 160864 - DNA, 17 bp, Arabidopsis thaliana
ttatcagtccggctcta

SEQ ID NO: 160865 - DNA, 17 bp, Arabidopsis thaliana
ttatcagtttacgattt

SEQ ID NO: 160866 - DNA, 17 bp, Arabidopsis thaliana
ttatcatctgacgattc

SEQ ID NO: 160867 - DNA, 17 bp, Arabidopsis thaliana
ttatcatggatggaaat

SEQ ID NO: 160868 - DNA, 17 bp, Arabidopsis thaliana
ttatcatggttgctctg

SEQ ID NO: 160869 - DNA, 17 bp, Arabidopsis thaliana
ttatcattttcattcag

SEQ ID NO: 160870 - DNA, 17 bp, Arabidopsis thaliana
ttatccaagattgtgca

SEQ ID NO: 160871 - DNA, 17 bp, Arabidopsis thaliana
ttatccaattggtggtt

SEQ ID NO: 160872 - DNA, 17 bp, Arabidopsis thaliana
ttatccaatttttgtcc

SEQ ID NO: 160873 - DNA, 17 bp, Arabidopsis thaliana
ttatccacccgaccgga

SEQ ID NO: 160874 - DNA, 17 bp, Arabidopsis thaliana
ttatccagactgttggc

SEQ ID NO: 160875 - DNA, 17 bp, Arabidopsis thaliana
ttatccagtctggtttg

SEQ ID NO: 160876 - DNA, 17 bp, Arabidopsis thaliana
ttatcccccgtgttttg

SEQ ID NO: 160877 - DNA, 17 bp, Arabidopsis thaliana
ttatccctatcactggc

SEQ ID NO: 160878 - DNA, 17 bp, Arabidopsis thaliana
ttatccgacagctggtt

SEQ ID NO: 160879 - DNA, 17 bp, Arabidopsis thaliana
ttatccgagatcgccat

SEQ ID NO: 160880 - DNA, 17 bp, Arabidopsis thaliana
ttatccgcagcataccg

SEQ ID NO: 160881 - DNA, 17 bp, Arabidopsis thaliana
ttatccgcagttgaacc

SEQ ID NO: 160882 - DNA, 17 bp, Arabidopsis thaliana
ttatccgcagttgaatc

SEQ ID NO: 160883 - DNA, 17 bp, Arabidopsis thaliana
ttatccgcctcgaatta

SEQ ID NO: 160884 - DNA, 17 bp, Arabidopsis thaliana
ttatccgctttgacatt

SEQ ID NO: 160885 - DNA, 17 bp, Arabidopsis thaliana
ttatccggattgtttag

SEQ ID NO: 160886 - DNA, 17 bp, Arabidopsis thaliana
ttatccggcgacggcga

SEQ ID NO: 160887 - DNA, 17 bp, Arabidopsis thaliana
ttatccggcggaccagg

SEQ ID NO: 160888 - DNA, 17 bp, Arabidopsis thaliana
ttatccgtcgaactgat

SEQ ID NO: 160889 - DNA, 17 bp, Arabidopsis thaliana
ttatccgttctcttgcc

SEQ ID NO: 160890 - DNA, 17 bp, Arabidopsis thaliana
ttatcctgcaccaagca

SEQ ID NO: 160891 - DNA, 17 bp, Arabidopsis thaliana
ttatccttgtcgctccg

SEQ ID NO: 160892 - DNA, 17 bp, Arabidopsis thaliana
ttatcgaacgctatgtt

SEQ ID NO: 160893 - DNA, 17 bp, Arabidopsis thaliana
ttatcgattcgggcaat

SEQ ID NO: 160894 - DNA, 17 bp, Arabidopsis thaliana
ttatcgcagatcacaag

SEQ ID NO: 160895 - DNA, 17 bp, Arabidopsis thaliana
ttatcgcgaagctaacc

SEQ ID NO: 160896 - DNA, 17 bp, Arabidopsis thaliana
ttatcgctgtttctcgc

SEQ ID NO: 160897 - DNA, 17 bp, Arabidopsis thaliana
ttatcggactgtctggg

SEQ ID NO: 160898 - DNA, 17 bp, Arabidopsis thaliana
ttatcggagatcgattg

SEQ ID NO: 160899 - DNA, 17 bp, Arabidopsis thaliana
ttatcggctaagttttt

SEQ ID NO: 160900 - DNA, 17 bp, Arabidopsis thaliana
ttatcggctgagagatt

SEQ ID NO: 160901 - DNA, 17 bp, Arabidopsis thaliana
ttatcggcttggaagct

SEQ ID NO: 160902 - DNA, 17 bp, Arabidopsis thaliana
ttatcgggaagctaacc

SEQ ID NO: 160903 - DNA, 17 bp, Arabidopsis thaliana
ttatcgggaatctaacc

SEQ ID NO: 160904 - DNA, 17 bp, Arabidopsis thaliana
ttatcggttaactggtc

SEQ ID NO: 160905 - DNA, 17 bp, Arabidopsis thaliana
ttatcggttcaaggacg

SEQ ID NO: 160906 - DNA, 17 bp, Arabidopsis thaliana
ttatcggttgggaccgt

SEQ ID NO: 160907 - DNA, 17 bp, Arabidopsis thaliana
ttatcgtctctacaaat

SEQ ID NO: 160908 - DNA, 17 bp, Arabidopsis thaliana
ttatcgtggagaaatag

SEQ ID NO: 160909 - DNA, 17 bp, Arabidopsis thaliana
ttatcgtggtgcgccat

SEQ ID NO: 160910 - DNA, 17 bp, Arabidopsis thaliana
ttatcgtgttacgtctc

SEQ ID NO: 160911 - DNA, 17 bp, Arabidopsis thaliana
ttatcgttactttctgc

SEQ ID NO: 160912 - DNA, 17 bp, Arabidopsis thaliana
ttatcgttatttcgttc

SEQ ID NO: 160913 - DNA, 17 bp, Arabidopsis thaliana
ttatcgttcatatggct

SEQ ID NO: 160914 - DNA, 17 bp, Arabidopsis thaliana
ttatctacaccactcac

SEQ ID NO: 160915 - DNA, 17 bp, Arabidopsis thaliana
ttatctacaccactcat

SEQ ID NO: 160916 - DNA, 17 bp, Arabidopsis thaliana
ttatctaccgaacgatc

SEQ ID NO: 160917 - DNA, 17 bp, Arabidopsis thaliana
ttatctacttcgctgcc

SEQ ID NO: 160918 - DNA, 17 bp, Arabidopsis thaliana
ttatctatcatgtcgtc

SEQ ID NO: 160919 - DNA, 17 bp, Arabidopsis thaliana
ttatctcgactccgacg

SEQ ID NO: 160920 - DNA, 17 bp, Arabidopsis thaliana
ttatctcgggtgccaag

SEQ ID NO: 160921 - DNA, 17 bp, Arabidopsis thaliana
ttatctcgttgttgtgc

SEQ ID NO: 160922 - DNA, 17 bp, Arabidopsis thaliana
ttatctcgttgttgttc

SEQ ID NO: 160923 - DNA, 17 bp, Arabidopsis thaliana
ttatctgaactcgattc

SEQ ID NO: 160924 - DNA, 17 bp, Arabidopsis thaliana
ttatctgatgttaccgc

SEQ ID NO: 160925 - DNA, 17 bp, Arabidopsis thaliana
ttatctgcaccgatcat

SEQ ID NO: 160926 - DNA, 17 bp, Arabidopsis thaliana
ttatctgcagttgaacc

SEQ ID NO: 160927 - DNA, 17 bp, Arabidopsis thaliana
ttatctgccgcctcaga

SEQ ID NO: 160928 - DNA, 17 bp, Arabidopsis thaliana
ttatctgcgatttagtc

SEQ ID NO: 160929 - DNA, 17 bp, Arabidopsis thaliana
ttatctgcggacaaaac

SEQ ID NO: 160930 - DNA, 17 bp, Arabidopsis thaliana
ttatctgcggaccaaac

SEQ ID NO: 160931 - DNA, 17 bp, Arabidopsis thaliana
ttatctgcggtttagtc

SEQ ID NO: 160932 - DNA, 17 bp, Arabidopsis thaliana
ttatctgctttatccgc

SEQ ID NO: 160933 - DNA, 17 bp, Arabidopsis thaliana
ttatctgctttgtccgc

SEQ ID NO: 160934 - DNA, 17 bp, Arabidopsis thaliana
ttatctggcccaagtac

SEQ ID NO: 160935 - DNA, 17 bp, Arabidopsis thaliana
ttatctggcgtaacaga

SEQ ID NO: 160936 - DNA, 17 bp, Arabidopsis thaliana
ttatctgggacggagac

SEQ ID NO: 160937 - DNA, 17 bp, Arabidopsis thaliana
ttatctgggacggaggc

SEQ ID NO: 160938 - DNA, 17 bp, Arabidopsis thaliana
ttatctgtatctaccgc

SEQ ID NO: 160939 - DNA, 17 bp, Arabidopsis thaliana
ttatctgtctgctactc

SEQ ID NO: 160940 - DNA, 17 bp, Arabidopsis thaliana
ttatcttaatgatccga

SEQ ID NO: 160941 - DNA, 17 bp, Arabidopsis thaliana
ttatcttcctgcggcga

SEQ ID NO: 160942 - DNA, 17 bp, Arabidopsis thaliana
ttatcttcgaagtgtct

SEQ ID NO: 160943 - DNA, 17 bp, Arabidopsis thaliana
ttatcttcgatgtgcgc

SEQ ID NO: 160944 - DNA, 17 bp, Arabidopsis thaliana
ttatcttcgccaggtac

SEQ ID NO: 160945 - DNA, 17 bp, Arabidopsis thaliana
ttatcttcggaaaccag

SEQ ID NO: 160946 - DNA, 17 bp, Arabidopsis thaliana
ttatcttctacagcagg

SEQ ID NO: 160947 - DNA, 17 bp, Arabidopsis thaliana
ttatcttgcactgagcc

SEQ ID NO: 160948 - DNA, 17 bp, Arabidopsis thaliana
ttatcttgtgtctgcag

SEQ ID NO: 160949 - DNA, 17 bp, Arabidopsis thaliana
ttatctttctacggcca

SEQ ID NO: 160950 - DNA, 17 bp, Arabidopsis thaliana
ttatctttctggaaaag

SEQ ID NO: 160951 - DNA, 17 bp, Arabidopsis thaliana
ttatctttttctgccat

SEQ ID NO: 160952 - DNA, 17 bp, Arabidopsis thaliana
ttatgaaagacgaacaa

SEQ ID NO: 160953 - DNA, 17 bp, Arabidopsis thaliana
ttatgaacactccaagg

SEQ ID NO: 160954 - DNA, 17 bp, Arabidopsis thaliana
ttatgaagactttggca

SEQ ID NO: 160955 - DNA, 17 bp, Arabidopsis thaliana
ttatgaagtctaggtag

SEQ ID NO: 160956 - DNA, 17 bp, Arabidopsis thaliana
ttatgaagtctaggtgg

SEQ ID NO: 160957 - DNA, 17 bp, Arabidopsis thaliana
ttatgaatcgtcggaag

SEQ ID NO: 160958 - DNA, 17 bp, Arabidopsis thaliana
ttatgacatggtgccag

SEQ ID NO: 160959 - DNA, 17 bp, Arabidopsis thaliana
ttatgaccattgggccg

SEQ ID NO: 160960 - DNA, 17 bp, Arabidopsis thaliana
ttatgaccggtggttgg

SEQ ID NO: 160961 - DNA, 17 bp, Arabidopsis thaliana
ttatgacctgcttgtcg

SEQ ID NO: 160962 - DNA, 17 bp, Arabidopsis thaliana
ttatgacgactcataag

SEQ ID NO: 160963 - DNA, 17 bp, Arabidopsis thaliana
ttatgactgaacgcctc

SEQ ID NO: 160964 - DNA, 17 bp, Arabidopsis thaliana
ttatgactgtcagaacc

SEQ ID NO: 160965 - DNA, 17 bp, Arabidopsis thaliana
ttatgagaaatcaaagt

SEQ ID NO: 160966 - DNA, 17 bp, Arabidopsis thaliana
ttatgagacctaggctt

SEQ ID NO: 160967 - DNA, 17 bp, Arabidopsis thaliana
ttatgagactttagccc

SEQ ID NO: 160968 - DNA, 17 bp, Arabidopsis thaliana
ttatgagcgatcgactt

SEQ ID NO: 160969 - DNA, 17 bp, Arabidopsis thaliana
ttatgaggctacggcag

SEQ ID NO: 160970 - DNA, 17 bp, Arabidopsis thaliana
ttatgagggagtggtca

SEQ ID NO: 160971 - DNA, 17 bp, Arabidopsis thaliana
ttatgagttgcctgtcg

SEQ ID NO: 160972 - DNA, 17 bp, Arabidopsis thaliana
ttatgagtttgcctgtc

SEQ ID NO: 160973 - DNA, 17 bp, Arabidopsis thaliana
ttatgatcctgttcgtt

SEQ ID NO: 160974 - DNA, 17 bp, Arabidopsis thaliana
ttatgatgggtgacctt

SEQ ID NO: 160975 - DNA, 17 bp, Arabidopsis thaliana
ttatgatgtatggttcg

SEQ ID NO: 160976 - DNA, 17 bp, Arabidopsis thaliana
ttatgattatgttcgtt

SEQ ID NO: 160977 - DNA, 17 bp, Arabidopsis thaliana
ttatgattattccaggc

SEQ ID NO: 160978 - DNA, 17 bp, Arabidopsis thaliana
ttatgcacactgatgct

SEQ ID NO: 160979 - DNA, 17 bp, Arabidopsis thaliana
ttatgcatggggcactt

SEQ ID NO: 160980 - DNA, 17 bp, Arabidopsis thaliana
ttatgccatgtcacgtc

SEQ ID NO: 160981 - DNA, 17 bp, Arabidopsis thaliana
ttatgcccggaaaaagt

SEQ ID NO: 160982 - DNA, 17 bp, Arabidopsis thaliana
ttatgccctgggcgaca

SEQ ID NO: 160983 - DNA, 17 bp, Arabidopsis thaliana
ttatgccggttcggctt

SEQ ID NO: 160984 - DNA, 17 bp, Arabidopsis thaliana
ttatgcgagagagaatc

SEQ ID NO: 160985 - DNA, 17 bp, Arabidopsis thaliana
ttatgcgatctaggtgc

SEQ ID NO: 160986 - DNA, 17 bp, Arabidopsis thaliana
ttatgcgcacagtggac

SEQ ID NO: 160987 - DNA, 17 bp, Arabidopsis thaliana
ttatgcgcagagccgtg

SEQ ID NO: 160988 - DNA, 17 bp, Arabidopsis thaliana
ttatgcggaacacatgc

SEQ ID NO: 160989 - DNA, 17 bp, Arabidopsis thaliana
ttatgcgtgtcatcgca

SEQ ID NO: 160990 - DNA, 17 bp, Arabidopsis thaliana
ttatgcgtttttggctt

SEQ ID NO: 160991 - DNA, 17 bp, Arabidopsis thaliana
ttatgctcgaagattgc

SEQ ID NO: 160992 - DNA, 17 bp, Arabidopsis thaliana
ttatgcttccatagatg

SEQ ID NO: 160993 - DNA, 17 bp, Arabidopsis thaliana
ttatggaactcgcagta

SEQ ID NO: 160994 - DNA, 17 bp, Arabidopsis thaliana
ttatggacccgaacctg

SEQ ID NO: 160995 - DNA, 17 bp, Arabidopsis thaliana
ttatggaccgatccgta

SEQ ID NO: 160996 - DNA, 17 bp, Arabidopsis thaliana
ttatggattcgcgtaag

SEQ ID NO: 160997 - DNA, 17 bp, Arabidopsis thaliana
ttatgggacgagttggc

SEQ ID NO: 160998 - DNA, 17 bp, Arabidopsis thaliana
ttatgggactcactgat

SEQ ID NO: 160999 - DNA, 17 bp, Arabidopsis thaliana
ttatgggcttagatgat

SEQ ID NO: 161000 - DNA, 17 bp, Arabidopsis thaliana
ttatggggactctcgtc

SEQ ID NO: 161001 - DNA, 17 bp, Arabidopsis thaliana
ttatggggtgcccgtgt

SEQ ID NO: 161002 - DNA, 17 bp, Arabidopsis thaliana
ttatggtatcagagcga

SEQ ID NO: 161003 - DNA, 17 bp, Arabidopsis thaliana
ttatggtgtccattgaa

SEQ ID NO: 161004 - DNA, 17 bp, Arabidopsis thaliana
ttatgtacccgtcagtt

SEQ ID NO: 161005 - DNA, 17 bp, Arabidopsis thaliana
ttatgtcacggcagcca

SEQ ID NO: 161006 - DNA, 17 bp, Arabidopsis thaliana
ttatgtccagtttgctt

SEQ ID NO: 161007 - DNA, 17 bp, Arabidopsis thaliana
ttatgtgacattcgatc

SEQ ID NO: 161008 - DNA, 17 bp, Arabidopsis thaliana
ttatgtgcggaactaga

SEQ ID NO: 161009 - DNA, 17 bp, Arabidopsis thaliana
ttatgtgtgaaacgcga

SEQ ID NO: 161010 - DNA, 17 bp, Arabidopsis thaliana
ttatgttcacgcgctgg

SEQ ID NO: 161011 - DNA, 17 bp, Arabidopsis thaliana
ttatgttcccgggattc

SEQ ID NO: 161012 - DNA, 17 bp, Arabidopsis thaliana
ttatgttctccggtgtc

SEQ ID NO: 161013 - DNA, 17 bp, Arabidopsis thaliana
ttatgttgactaacctt

SEQ ID NO: 161014 - DNA, 17 bp, Arabidopsis thaliana
ttatgttgactgggctt

SEQ ID NO: 161015 - DNA, 17 bp, Arabidopsis thaliana
ttatgttgtaacgtgtg

SEQ ID NO: 161016 - DNA, 17 bp, Arabidopsis thaliana
ttattacccagcgtgtc

SEQ ID NO: 161017 - DNA, 17 bp, Arabidopsis thaliana
ttattagataaaaggtc

SEQ ID NO: 161018 - DNA, 17 bp, Arabidopsis thaliana
ttattagtttacatgca

SEQ ID NO: 161019 - DNA, 17 bp, Arabidopsis thaliana
ttattatcgcacccgct

SEQ ID NO: 161020 - DNA, 17 bp, Arabidopsis thaliana
ttattattcgtttggac

SEQ ID NO: 161021 - DNA, 17 bp, Arabidopsis thaliana
ttattcaacttctgatg

SEQ ID NO: 161022 - DNA, 17 bp, Arabidopsis thaliana
ttattcagcaggacgtt

SEQ ID NO: 161023 - DNA, 17 bp, Arabidopsis thaliana
ttattcagtttcacggg

SEQ ID NO: 161024 - DNA, 17 bp, Arabidopsis thaliana
ttattcatttgagtcac

SEQ ID NO: 161025 - DNA, 17 bp, Arabidopsis thaliana
ttattccgtttgaggca

SEQ ID NO: 161026 - DNA, 17 bp, Arabidopsis thaliana
ttattcctcatctccgc

SEQ ID NO: 161027 - DNA, 17 bp, Arabidopsis thaliana
ttattcctcttccacgc

SEQ ID NO: 161028 - DNA, 17 bp, Arabidopsis thaliana
ttattcgacttgccctt

SEQ ID NO: 161029 - DNA, 17 bp, Arabidopsis thaliana
ttattcgcgttgtgtgc

SEQ ID NO: 161030 - DNA, 17 bp, Arabidopsis thaliana
ttattcgtgtgagccaa

SEQ ID NO: 161031 - DNA, 17 bp, Arabidopsis thaliana
ttattcgtttcaggatc

SEQ ID NO: 161032 - DNA, 17 bp, Arabidopsis thaliana
ttattctattgtgcctc

SEQ ID NO: 161033 - DNA, 17 bp, Arabidopsis thaliana
ttattctccgatttgca

SEQ ID NO: 161034 - DNA, 17 bp, Arabidopsis thaliana
ttattctgcagacactg

SEQ ID NO: 161035 - DNA, 17 bp, Arabidopsis thaliana
ttattgaactgtcgatt

SEQ ID NO: 161036 - DNA, 17 bp, Arabidopsis thaliana
ttattgaatcagggatc

SEQ ID NO: 161037 - DNA, 17 bp, Arabidopsis thaliana
ttattgaccgcaactta

SEQ ID NO: 161038 - DNA, 17 bp, Arabidopsis thaliana
ttattgaccgcaacttc

SEQ ID NO: 161039 - DNA, 17 bp, Arabidopsis thaliana
ttattgacttttcgtcg

SEQ ID NO: 161040 - DNA, 17 bp, Arabidopsis thaliana
ttattgactttttgtcg

SEQ ID NO: 161041 - DNA, 17 bp, Arabidopsis thaliana
ttattgagccgtgtcac

SEQ ID NO: 161042 - DNA, 17 bp, Arabidopsis thaliana
ttattgattccgtggca

SEQ ID NO: 161043 - DNA, 17 bp, Arabidopsis thaliana
ttattgccttttgaact

SEQ ID NO: 161044 - DNA, 17 bp, Arabidopsis thaliana
ttattgcgagcccagaa

SEQ ID NO: 161045 - DNA, 17 bp, Arabidopsis thaliana
ttattgcgccactatat

SEQ ID NO: 161046 - DNA, 17 bp, Arabidopsis thaliana
ttattgcgctgtgtgtt

SEQ ID NO: 161047 - DNA, 17 bp, Arabidopsis thaliana
ttattgcgttttcgtcc

SEQ ID NO: 161048 - DNA, 17 bp, Arabidopsis thaliana
ttattgctcgacgcatg

SEQ ID NO: 161049 - DNA, 17 bp, Arabidopsis thaliana
ttattggaacccggtta

SEQ ID NO: 161050 - DNA, 17 bp, Arabidopsis thaliana
ttattggaactaaggac

SEQ ID NO: 161051 - DNA, 17 bp, Arabidopsis thaliana
ttattggaccacgtgaa

SEQ ID NO: 161052 - DNA, 17 bp, Arabidopsis thaliana
ttattggaccttgtgct

SEQ ID NO: 161053 - DNA, 17 bp, Arabidopsis thaliana
ttattggatctaaagac

SEQ ID NO: 161054 - DNA, 17 bp, Arabidopsis thaliana
ttattggcccgtctact

SEQ ID NO: 161055 - DNA, 17 bp, Arabidopsis thaliana
ttattgggcattttcgt

SEQ ID NO: 161056 - DNA, 17 bp, Arabidopsis thaliana
ttattgggtttaatcgc

SEQ ID NO: 161057 - DNA, 17 bp, Arabidopsis thaliana
ttattgggtttaatcgt

SEQ ID NO: 161058 - DNA, 17 bp, Arabidopsis thaliana
ttattggtggtggactt

SEQ ID NO: 161059 - DNA, 17 bp, Arabidopsis thaliana
ttattggttgcgacggt

SEQ ID NO: 161060 - DNA, 17 bp, Arabidopsis thaliana
ttattgtcttggccgga

SEQ ID NO: 161061 - DNA, 17 bp, Arabidopsis thaliana
ttattgtgccaaacccg

SEQ ID NO: 161062 - DNA, 17 bp, Arabidopsis thaliana
ttattgtggactggttc

SEQ ID NO: 161063 - DNA, 17 bp, Arabidopsis thaliana
ttattgttgagatcgtg

SEQ ID NO: 161064 - DNA, 17 bp, Arabidopsis thaliana
ttatttaatctcagccg

SEQ ID NO: 161065 - DNA, 17 bp, Arabidopsis thaliana
ttatttacaacggctgc

SEQ ID NO: 161066 - DNA, 17 bp, Arabidopsis thaliana
ttatttacagcggcagc

SEQ ID NO: 161067 - DNA, 17 bp, Arabidopsis thaliana
ttatttacagcggctgc

SEQ ID NO: 161068 - DNA, 17 bp, Arabidopsis thaliana
ttatttacagtggctgc

SEQ ID NO: 161069 - DNA, 17 bp, Arabidopsis thaliana
ttatttaccatccaatg

SEQ ID NO: 161070 - DNA, 17 bp, Arabidopsis thaliana
ttatttcagcctcagca

SEQ ID NO: 161071 - DNA, 17 bp, Arabidopsis thaliana
ttatttccacctaattt

SEQ ID NO: 161072 - DNA, 17 bp, Arabidopsis thaliana
ttatttccatcttgcag

SEQ ID NO: 161073 - DNA, 17 bp, Arabidopsis thaliana
ttatttccgcagacctt

SEQ ID NO: 161074 - DNA, 17 bp, Arabidopsis thaliana
ttatttccggtgccatt

SEQ ID NO: 161075 - DNA, 17 bp, Arabidopsis thaliana
ttatttcgatgatggtg

SEQ ID NO: 161076 - DNA, 17 bp, Arabidopsis thaliana
ttatttcgtcggagggc

SEQ ID NO: 161077 - DNA, 17 bp, Arabidopsis thaliana
ttatttcgtcggagggt

SEQ ID NO: 161078 - DNA, 17 bp, Arabidopsis thaliana
ttatttcgtttcgtcga

SEQ ID NO: 161079 - DNA, 17 bp, Arabidopsis thaliana
ttatttctgtgcactgg

SEQ ID NO: 161080 - DNA, 17 bp, Arabidopsis thaliana
ttatttgattgagccgt

SEQ ID NO: 161081 - DNA, 17 bp, Arabidopsis thaliana
ttatttgcaacaagcac

SEQ ID NO: 161082 - DNA, 17 bp, Arabidopsis thaliana
ttatttggaaccgcttg

SEQ ID NO: 161083 - DNA, 17 bp, Arabidopsis thaliana
ttatttggaccgctaat

SEQ ID NO: 161084 - DNA, 17 bp, Arabidopsis thaliana
ttatttggagagagttg

SEQ ID NO: 161085 - DNA, 17 bp, Arabidopsis thaliana
ttatttgtgataaccac

SEQ ID NO: 161086 - DNA, 17 bp, Arabidopsis thaliana
ttatttgtgtcgacatc

SEQ ID NO: 161087 - DNA, 17 bp, Arabidopsis thaliana
ttattttcaatcagcgg

SEQ ID NO: 161088 - DNA, 17 bp, Arabidopsis thaliana
ttattttgatgacgagc

SEQ ID NO: 161089 - DNA, 17 bp, Arabidopsis thaliana
ttattttgatgtgggtc

SEQ ID NO: 161090 - DNA, 17 bp, Arabidopsis thaliana
ttattttgtgccgccgg

SEQ ID NO: 161091 - DNA, 17 bp, Arabidopsis thaliana
ttatttttgcaacagta

SEQ ID NO: 161092 - DNA, 17 bp, Arabidopsis thaliana
ttatttttgcggggaaa

SEQ ID NO: 161093 - DNA, 17 bp, Arabidopsis thaliana
ttattttttctgctcaa

SEQ ID NO: 161094 - DNA, 17 bp, Arabidopsis thaliana
ttcaaaacacttggcga

SEQ ID NO: 161095 - DNA, 17 bp, Arabidopsis thaliana
ttcaaaacggcttggtc

SEQ ID NO: 161096 - DNA, 17 bp, Arabidopsis thaliana
ttcaaaagatgttagcc

SEQ ID NO: 161097 - DNA, 17 bp, Arabidopsis thaliana
ttcaaaagctatagtgc

SEQ ID NO: 161098 - DNA, 17 bp, Arabidopsis thaliana
ttcaaaaggtccttccc

SEQ ID NO: 161099 - DNA, 17 bp, Arabidopsis thaliana
ttcaaaatcagccaggt

SEQ ID NO: 161100 - DNA, 17 bp, Arabidopsis thaliana
ttcaaaatctgtgttgt

SEQ ID NO: 161101 - DNA, 17 bp, Arabidopsis thaliana
ttcaaacccgggctcag

SEQ ID NO: 161102 - DNA, 17 bp, Arabidopsis thaliana
ttcaaagattacccggg

SEQ ID NO: 161103 - DNA, 17 bp, Arabidopsis thaliana
ttcaaagcattgcgatg

SEQ ID NO: 161104 - DNA, 17 bp, Arabidopsis thaliana
ttcaaagcggatatgtc

SEQ ID NO: 161105 - DNA, 17 bp, Arabidopsis thaliana
ttcaaagcgtctggctc

SEQ ID NO: 161106 - DNA, 17 bp, Arabidopsis thaliana
ttcaaaggtccgtcttc

SEQ ID NO: 161107 - DNA, 17 bp, Arabidopsis thaliana
ttcaaataccacgacac

SEQ ID NO: 161108 - DNA, 17 bp, Arabidopsis thaliana
ttcaaatactcgaacgg

SEQ ID NO: 161109 - DNA, 17 bp, Arabidopsis thaliana
ttcaaatcatcgtagta

SEQ ID NO: 161110 - DNA, 17 bp, Arabidopsis thaliana
ttcaaatccaactcggc

SEQ ID NO: 161111 - DNA, 17 bp, Arabidopsis thaliana
ttcaaatccagctcgac

SEQ ID NO: 161112 - DNA, 17 bp, Arabidopsis thaliana
ttcaaatccagctcggc

SEQ ID NO: 161113 - DNA, 17 bp, Arabidopsis thaliana
ttcaaatccaggatgcc

SEQ ID NO: 161114 - DNA, 17 bp, Arabidopsis thaliana
ttcaaatccaggatggc

SEQ ID NO: 161115 - DNA, 17 bp, Arabidopsis thaliana
ttcaaatccagttcggc

SEQ ID NO: 161116 - DNA, 17 bp, Arabidopsis thaliana
ttcaaatcccacagctg

SEQ ID NO: 161117 - DNA, 17 bp, Arabidopsis thaliana
ttcaaatcccacagttg

SEQ ID NO: 161118 - DNA, 17 bp, Arabidopsis thaliana
ttcaaatccgggtgccg

SEQ ID NO: 161119 - DNA, 17 bp, Arabidopsis thaliana
ttcaaatcctacagagc

SEQ ID NO: 161120 - DNA, 17 bp, Arabidopsis thaliana
ttcaaatcctacttggg

SEQ ID NO: 161121 - DNA, 17 bp, Arabidopsis thaliana
ttcaaatcctattggac

SEQ ID NO: 161122 - DNA, 17 bp, Arabidopsis thaliana
ttcaaatcctgtctccg

SEQ ID NO: 161123 - DNA, 17 bp, Arabidopsis thaliana
ttcaaatgggaggatgg

SEQ ID NO: 161124 - DNA, 17 bp, Arabidopsis thaliana
ttcaaattccgtcgcac

SEQ ID NO: 161125 - DNA, 17 bp, Arabidopsis thaliana
ttcaaattcgggtgccg

SEQ ID NO: 161126 - DNA, 17 bp, Arabidopsis thaliana
ttcaaattgtgacctgt

SEQ ID NO: 161127 - DNA, 17 bp, Arabidopsis thaliana
ttcaacaacctgacact

SEQ ID NO: 161128 - DNA, 17 bp, Arabidopsis thaliana
ttcaacacctccattgc

SEQ ID NO: 161129 - DNA, 17 bp, Arabidopsis thaliana
ttcaacactgaggtggt

SEQ ID NO: 161130 - DNA, 17 bp, Arabidopsis thaliana
ttcaacacttccattgc

SEQ ID NO: 161131 - DNA, 17 bp, Arabidopsis thaliana
ttcaacacttccatttg

SEQ ID NO: 161132 - DNA, 17 bp, Arabidopsis thaliana
ttcaacagacggttctg

SEQ ID NO: 161133 - DNA, 17 bp, Arabidopsis thaliana
ttcaacagcgatctgag

SEQ ID NO: 161134 - DNA, 17 bp, Arabidopsis thaliana
ttcaacagtgcttggac

SEQ ID NO: 161135 - DNA, 17 bp, Arabidopsis thaliana
ttcaacagttggtgacc

SEQ ID NO: 161136 - DNA, 17 bp, Arabidopsis thaliana
ttcaacatttatttgga

SEQ ID NO: 161137 - DNA, 17 bp, Arabidopsis thaliana
ttcaaccaacccaccca

SEQ ID NO: 161138 - DNA, 17 bp, Arabidopsis thaliana
ttcaaccaccgggatga

SEQ ID NO: 161139 - DNA, 17 bp, Arabidopsis thaliana
ttcaaccgaatgaccaa

SEQ ID NO: 161140 - DNA, 17 bp, Arabidopsis thaliana
ttcaaccgaatgaccag

SEQ ID NO: 161141 - DNA, 17 bp, Arabidopsis thaliana
ttcaaccgatcggaccg

SEQ ID NO: 161142 - DNA, 17 bp, Arabidopsis thaliana
ttcaaccgccgtctgcg

SEQ ID NO: 161143 - DNA, 17 bp, Arabidopsis thaliana
ttcaaccggacaatccg

SEQ ID NO: 161144 - DNA, 17 bp, Arabidopsis thaliana
ttcaaccggttcaccag

SEQ ID NO: 161145 - DNA, 17 bp, Arabidopsis thaliana
ttcaacctgcatgggcc

SEQ ID NO: 161146 - DNA, 17 bp, Arabidopsis thaliana
ttcaaccttgcaagcta

SEQ ID NO: 161147 - DNA, 17 bp, Arabidopsis thaliana
ttcaacgactggttgtg

SEQ ID NO: 161148 - DNA, 17 bp, Arabidopsis thaliana
ttcaacgattcccgatt

SEQ ID NO: 161149 - DNA, 17 bp, Arabidopsis thaliana
ttcaacggatatctcgg

SEQ ID NO: 161150 - DNA, 17 bp, Arabidopsis thaliana
ttcaacggtcggatgta

SEQ ID NO: 161151 - DNA, 17 bp, Arabidopsis thaliana
ttcaacggttctcgatt

SEQ ID NO: 161152 - DNA, 17 bp, Arabidopsis thaliana
ttcaacggtttcccaga

SEQ ID NO: 161153 - DNA, 17 bp, Arabidopsis thaliana
ttcaacgtcccgcaacg

SEQ ID NO: 161154 - DNA, 17 bp, Arabidopsis thaliana
ttcaactccaggattta

SEQ ID NO: 161155 - DNA, 17 bp, Arabidopsis thaliana
ttcaactccgacagaag

SEQ ID NO: 161156 - DNA, 17 bp, Arabidopsis thaliana
ttcaactccggtctacc

SEQ ID NO: 161157 - DNA, 17 bp, Arabidopsis thaliana
ttcaactcctcgggtcg

SEQ ID NO: 161158 - DNA, 17 bp, Arabidopsis thaliana
ttcaactcctggtcgat

SEQ ID NO: 161159 - DNA, 17 bp, Arabidopsis thaliana
ttcaactgtttgtgatt

SEQ ID NO: 161160 - DNA, 17 bp, Arabidopsis thaliana
ttcaacttccatctctg

SEQ ID NO: 161161 - DNA, 17 bp, Arabidopsis thaliana
ttcaacttcgcatgtga

SEQ ID NO: 161162 - DNA, 17 bp, Arabidopsis thaliana
ttcaagaagaaagacca

SEQ ID NO: 161163 - DNA, 17 bp, Arabidopsis thaliana
ttcaagaaggatcattt

SEQ ID NO: 161164 - DNA, 17 bp, Arabidopsis thaliana
ttcaagacaacctggag

SEQ ID NO: 161165 - DNA, 17 bp, Arabidopsis thaliana
ttcaagaccggagccgt

SEQ ID NO: 161166 - DNA, 17 bp, Arabidopsis thaliana
ttcaagacgaagacgac

SEQ ID NO: 161167 - DNA, 17 bp, Arabidopsis thaliana
ttcaagactctcctacc

SEQ ID NO: 161168 - DNA, 17 bp, Arabidopsis thaliana
ttcaagagttgccttgc

SEQ ID NO: 161169 - DNA, 17 bp, Arabidopsis thaliana
ttcaagatttcctttct

SEQ ID NO: 161170 - DNA, 17 bp, Arabidopsis thaliana
ttcaagatttgggcaaa

SEQ ID NO: 161171 - DNA, 17 bp, Arabidopsis thaliana
ttcaagcacatgagatt

SEQ ID NO: 161172 - DNA, 17 bp, Arabidopsis thaliana
ttcaagcccgcaaagat

SEQ ID NO: 161173 - DNA, 17 bp, Arabidopsis thaliana
ttcaagccctggtggag

SEQ ID NO: 161174 - DNA, 17 bp, Arabidopsis thaliana
ttcaagcgaatcgattc

SEQ ID NO: 161175 - DNA, 17 bp, Arabidopsis thaliana
ttcaagcgcctcttgac

SEQ ID NO: 161176 - DNA, 17 bp, Arabidopsis thaliana
ttcaagctcagattgtt

SEQ ID NO: 161177 - DNA, 17 bp, Arabidopsis thaliana
ttcaaggaacagtggcg

SEQ ID NO: 161178 - DNA, 17 bp, Arabidopsis thaliana
ttcaaggattggcaaag

SEQ ID NO: 161179 - DNA, 17 bp, Arabidopsis thaliana
ttcaaggccaaatgccc

SEQ ID NO: 161180 - DNA, 17 bp, Arabidopsis thaliana
ttcaagggttggcaaag

SEQ ID NO: 161181 - DNA, 17 bp, Arabidopsis thaliana
ttcaaggttaactagtt

SEQ ID NO: 161182 - DNA, 17 bp, Arabidopsis thaliana
ttcaaggttagcgatgt

SEQ ID NO: 161183 - DNA, 17 bp, Arabidopsis thaliana
ttcaaggttcgccgtgc

SEQ ID NO: 161184 - DNA, 17 bp, Arabidopsis thaliana
ttcaaggttgcaactgc

SEQ ID NO: 161185 - DNA, 17 bp, Arabidopsis thaliana
ttcaaggtttgccagcg

SEQ ID NO: 161186 - DNA, 17 bp, Arabidopsis thaliana
ttcaagtccaaaggtcc

SEQ ID NO: 161187 - DNA, 17 bp, Arabidopsis thaliana
ttcaagtccctccttcc

SEQ ID NO: 161188 - DNA, 17 bp, Arabidopsis thaliana
ttcaagtccctctatcc

SEQ ID NO: 161189 - DNA, 17 bp, Arabidopsis thaliana
ttcaagtcctggtggag

SEQ ID NO: 161190 - DNA, 17 bp, Arabidopsis thaliana
ttcaagtcctggtgggg

SEQ ID NO: 161191 - DNA, 17 bp, Arabidopsis thaliana
ttcaagtctcggtggga

SEQ ID NO: 161192 - DNA, 17 bp, Arabidopsis thaliana
ttcaagtctgcattcaa

SEQ ID NO: 161193 - DNA, 17 bp, Arabidopsis thaliana
ttcaagtctgcattgct

SEQ ID NO: 161194 - DNA, 17 bp, Arabidopsis thaliana
ttcaagttctcctgaat

SEQ ID NO: 161195 - DNA, 17 bp, Arabidopsis thaliana
ttcaagttctcctgcat

SEQ ID NO: 161196 - DNA, 17 bp, Arabidopsis thaliana
ttcaagtttgcgttgac

SEQ ID NO: 161197 - DNA, 17 bp, Arabidopsis thaliana
ttcaagttttgctttca

SEQ ID NO: 161198 - DNA, 17 bp, Arabidopsis thaliana
ttcaataccgtctagcg

SEQ ID NO: 161199 - DNA, 17 bp, Arabidopsis thaliana
ttcaatacctcctgctc

SEQ ID NO: 161200 - DNA, 17 bp, Arabidopsis thaliana
ttcaatacgaaccttat

SEQ ID NO: 161201 - DNA, 17 bp, Arabidopsis thaliana
ttcaatactcggttccc

SEQ ID NO: 161202 - DNA, 17 bp, Arabidopsis thaliana
ttcaatccgctgtaggc

SEQ ID NO: 161203 - DNA, 17 bp, Arabidopsis thaliana
ttcaatcctagagtgcc

SEQ ID NO: 161204 - DNA, 17 bp, Arabidopsis thaliana
ttcaatcgatgtgtcag

SEQ ID NO: 161205 - DNA, 17 bp, Arabidopsis thaliana
ttcaatcgtctaccagc

SEQ ID NO: 161206 - DNA, 17 bp, Arabidopsis thaliana
ttcaatgcccaggttgt

SEQ ID NO: 161207 - DNA, 17 bp, Arabidopsis thaliana
ttcaatgggtcgggttg

SEQ ID NO: 161208 - DNA, 17 bp, Arabidopsis thaliana
ttcaatgggtggtggaa

SEQ ID NO: 161209 - DNA, 17 bp, Arabidopsis thaliana
ttcaatgtcctcagaca

SEQ ID NO: 161210 - DNA, 17 bp, Arabidopsis thaliana
ttcaatgtctgctggtg

SEQ ID NO: 161211 - DNA, 17 bp, Arabidopsis thaliana
ttcaatgtctgttggtg

SEQ ID NO: 161212 - DNA, 17 bp, Arabidopsis thaliana
ttcaatgtgctcatcaa

SEQ ID NO: 161213 - DNA, 17 bp, Arabidopsis thaliana
ttcaatgtgctcatcag

SEQ ID NO: 161214 - DNA, 17 bp, Arabidopsis thaliana
ttcaatgtgtttcgcta

SEQ ID NO: 161215 - DNA, 17 bp, Arabidopsis thaliana
ttcaattcccggctggt

SEQ ID NO: 161216 - DNA, 17 bp, Arabidopsis thaliana
ttcaattcccgtcggac

SEQ ID NO: 161217 - DNA, 17 bp, Arabidopsis thaliana
ttcaattctcggaacgc

SEQ ID NO: 161218 - DNA, 17 bp, Arabidopsis thaliana
ttcaattctcggaatgc

SEQ ID NO: 161219 - DNA, 17 bp, Arabidopsis thaliana
ttcacaaaagcagaaga

SEQ ID NO: 161220 - DNA, 17 bp, Arabidopsis thaliana
ttcacaaaatggctgca

SEQ ID NO: 161221 - DNA, 17 bp, Arabidopsis thaliana
ttcacaacctcaccacc

SEQ ID NO: 161222 - DNA, 17 bp, Arabidopsis thaliana
ttcacaactcctaccac

SEQ ID NO: 161223 - DNA, 17 bp, Arabidopsis thaliana
ttcacaagactagattt

SEQ ID NO: 161224 - DNA, 17 bp, Arabidopsis thaliana
ttcacaagagagacatt

SEQ ID NO: 161225 - DNA, 17 bp, Arabidopsis thaliana
ttcacaagttccgggag

SEQ ID NO: 161226 - DNA, 17 bp, Arabidopsis thaliana
ttcacacagttattagg

SEQ ID NO: 161227 - DNA, 17 bp, Arabidopsis thaliana
ttcacaccgtctcacat

SEQ ID NO: 161228 - DNA, 17 bp, Arabidopsis thaliana
ttcacaccgtgtgatcg

SEQ ID NO: 161229 - DNA, 17 bp, Arabidopsis thaliana
ttcacagaatggtgaag

SEQ ID NO: 161230 - DNA, 17 bp, Arabidopsis thaliana
ttcacagactgctcaag

SEQ ID NO: 161231 - DNA, 17 bp, Arabidopsis thaliana
ttcacagactgttcaga

SEQ ID NO: 161232 - DNA, 17 bp, Arabidopsis thaliana
ttcacagactgtttaga

SEQ ID NO: 161233 - DNA, 17 bp, Arabidopsis thaliana
ttcacagaggctcagtt

SEQ ID NO: 161234 - DNA, 17 bp, Arabidopsis thaliana
ttcacagagtcgccttg

SEQ ID NO: 161235 - DNA, 17 bp, Arabidopsis thaliana
ttcacagcctttccgcc

SEQ ID NO: 161236 - DNA, 17 bp, Arabidopsis thaliana
ttcacagcctttccggc

SEQ ID NO: 161237 - DNA, 17 bp, Arabidopsis thaliana
ttcacagcgagaaggtt

SEQ ID NO: 161238 - DNA, 17 bp, Arabidopsis thaliana
ttcacagcgatttgttg

SEQ ID NO: 161239 - DNA, 17 bp, Arabidopsis thaliana
ttcacagctctttgaat

SEQ ID NO: 161240 - DNA, 17 bp, Arabidopsis thaliana
ttcacagcttctcctca

SEQ ID NO: 161241 - DNA, 17 bp, Arabidopsis thaliana
ttcacagtcaatggcag

SEQ ID NO: 161242 - DNA, 17 bp, Arabidopsis thaliana
ttcacagtctgtaggtt

SEQ ID NO: 161243 - DNA, 17 bp, Arabidopsis thaliana
ttcacagtgacccggct

SEQ ID NO: 161244 - DNA, 17 bp, Arabidopsis thaliana
ttcacagtgacccggtt

SEQ ID NO: 161245 - DNA, 17 bp, Arabidopsis thaliana
ttcacagttgtaccgca

SEQ ID NO: 161246 - DNA, 17 bp, Arabidopsis thaliana
ttcacatatccgatttg

SEQ ID NO: 161247 - DNA, 17 bp, Arabidopsis thaliana
ttcacatcagcttcacg

SEQ ID NO: 161248 - DNA, 17 bp, Arabidopsis thaliana
ttcacatcatccacagc

SEQ ID NO: 161249 - DNA, 17 bp, Arabidopsis thaliana
ttcacatgaggctacca

SEQ ID NO: 161250 - DNA, 17 bp, Arabidopsis thaliana
ttcacatgatgtggttt

SEQ ID NO: 161251 - DNA, 17 bp, Arabidopsis thaliana
ttcacatgttaggtgta

SEQ ID NO: 161252 - DNA, 17 bp, Arabidopsis thaliana
ttcaccaactttagccc

SEQ ID NO: 161253 - DNA, 17 bp, Arabidopsis thaliana
ttcaccaagtgttggat

SEQ ID NO: 161254 - DNA, 17 bp, Arabidopsis thaliana
ttcaccaattggcaggt

SEQ ID NO: 161255 - DNA, 17 bp, Arabidopsis thaliana
ttcaccacaccattgtg

SEQ ID NO: 161256 - DNA, 17 bp, Arabidopsis thaliana
ttcaccacatgctgcat

SEQ ID NO: 161257 - DNA, 17 bp, Arabidopsis thaliana
ttcaccactcacttctg

SEQ ID NO: 161258 - DNA, 17 bp, Arabidopsis thaliana
ttcaccacttttggcaa

SEQ ID NO: 161259 - DNA, 17 bp, Arabidopsis thaliana
ttcaccagaatctaacg

SEQ ID NO: 161260 - DNA, 17 bp, Arabidopsis thaliana
ttcaccagacttgtttt

SEQ ID NO: 161261 - DNA, 17 bp, Arabidopsis thaliana
ttcaccagatctgaaga

SEQ ID NO: 161262 - DNA, 17 bp, Arabidopsis thaliana
ttcaccaggtctgaaca

SEQ ID NO: 161263 - DNA, 17 bp, Arabidopsis thaliana
ttcaccagttggcaaag

SEQ ID NO: 161264 - DNA, 17 bp, Arabidopsis thaliana
ttcaccatcagcaccac

SEQ ID NO: 161265 - DNA, 17 bp, Arabidopsis thaliana
ttcaccatcgcgggttc

SEQ ID NO: 161266 - DNA, 17 bp, Arabidopsis thaliana
ttcaccatcttcaactg

SEQ ID NO: 161267 - DNA, 17 bp, Arabidopsis thaliana
ttcaccatgtttgctga

SEQ ID NO: 161268 - DNA, 17 bp, Arabidopsis thaliana
ttcaccattcaaagttg

SEQ ID NO: 161269 - DNA, 17 bp, Arabidopsis thaliana
ttcaccattcgatctgc

SEQ ID NO: 161270 - DNA, 17 bp, Arabidopsis thaliana
ttcaccattctgtgaat

SEQ ID NO: 161271 - DNA, 17 bp, Arabidopsis thaliana
ttcaccattctgttgac

SEQ ID NO: 161272 - DNA, 17 bp, Arabidopsis thaliana
ttcaccatttgcctttt

SEQ ID NO: 161273 - DNA, 17 bp, Arabidopsis thaliana
ttcacccaagtctgata

SEQ ID NO: 161274 - DNA, 17 bp, Arabidopsis thaliana
ttcacccccggactttt

SEQ ID NO: 161275 - DNA, 17 bp, Arabidopsis thaliana
ttcacccccttctccct

SEQ ID NO: 161276 - DNA, 17 bp, Arabidopsis thaliana
ttcacccctttgtcgct

SEQ ID NO: 161277 - DNA, 17 bp, Arabidopsis thaliana
ttcacccgggcgaagcc

SEQ ID NO: 161278 - DNA, 17 bp, Arabidopsis thaliana
ttcacccgggctcagac

SEQ ID NO: 161279 - DNA, 17 bp, Arabidopsis thaliana
ttcacccgtggtatacc

SEQ ID NO: 161280 - DNA, 17 bp, Arabidopsis thaliana
ttcacccttgcgcatgt

SEQ ID NO: 161281 - DNA, 17 bp, Arabidopsis thaliana
ttcaccgaacgggagaa

SEQ ID NO: 161282 - DNA, 17 bp, Arabidopsis thaliana
ttcaccgaacgggatta

SEQ ID NO: 161283 - DNA, 17 bp, Arabidopsis thaliana
ttcaccgcggccggctt

SEQ ID NO: 161284 - DNA, 17 bp, Arabidopsis thaliana
ttcaccgcttgctgtcg

SEQ ID NO: 161285 - DNA, 17 bp, Arabidopsis thaliana
ttcaccggaccaaacac

SEQ ID NO: 161286 - DNA, 17 bp, Arabidopsis thaliana
ttcaccggaccaaactc

SEQ ID NO: 161287 - DNA, 17 bp, Arabidopsis thaliana
ttcaccggagactctca

SEQ ID NO: 161288 - DNA, 17 bp, Arabidopsis thaliana
ttcaccggataaactca

SEQ ID NO: 161289 - DNA, 17 bp, Arabidopsis thaliana
ttcaccggattggctga

SEQ ID NO: 161290 - DNA, 17 bp, Arabidopsis thaliana
ttcaccggcgatcagtt

SEQ ID NO: 161291 - DNA, 17 bp, Arabidopsis thaliana
ttcaccggctctgtttt

SEQ ID NO: 161292 - DNA, 17 bp, Arabidopsis thaliana
ttcaccggtggtccagc

SEQ ID NO: 161293 - DNA, 17 bp, Arabidopsis thaliana
ttcaccggtgtggatat

SEQ ID NO: 161294 - DNA, 17 bp, Arabidopsis thaliana
ttcaccgtccgctaagc

SEQ ID NO: 161295 - DNA, 17 bp, Arabidopsis thaliana
ttcaccgtctgatatag

SEQ ID NO: 161296 - DNA, 17 bp, Arabidopsis thaliana
ttcacctaaaaagttat

SEQ ID NO: 161297 - DNA, 17 bp, Arabidopsis thaliana
ttcacctattcaggcgg

SEQ ID NO: 161298 - DNA, 17 bp, Arabidopsis thaliana
ttcacctattctacgga

SEQ ID NO: 161299 - DNA, 17 bp, Arabidopsis thaliana
ttcacctattgccaatt

SEQ ID NO: 161300 - DNA, 17 bp, Arabidopsis thaliana
ttcacctgaaccgtcaa

SEQ ID NO: 161301 - DNA, 17 bp, Arabidopsis thaliana
ttcacctggtggttatg

SEQ ID NO: 161302 - DNA, 17 bp, Arabidopsis thaliana
ttcaccttcgaacgctg

SEQ ID NO: 161303 - DNA, 17 bp, Arabidopsis thaliana
ttcacgaagaggcaaag

SEQ ID NO: 161304 - DNA, 17 bp, Arabidopsis thaliana
ttcacgaccaaacgcag

SEQ ID NO: 161305 - DNA, 17 bp, Arabidopsis thaliana
ttcacgacttctggtac

SEQ ID NO: 161306 - DNA, 17 bp, Arabidopsis thaliana
ttcacgagcctttgttt

SEQ ID NO: 161307 - DNA, 17 bp, Arabidopsis thaliana
ttcacgagtttggtgga

SEQ ID NO: 161308 - DNA, 17 bp, Arabidopsis thaliana
ttcacgatcctaagcgt

SEQ ID NO: 161309 - DNA, 17 bp, Arabidopsis thaliana
ttcacgcaccgacagag

SEQ ID NO: 161310 - DNA, 17 bp, Arabidopsis thaliana
ttcacgcctagggtttt

SEQ ID NO: 161311 - DNA, 17 bp, Arabidopsis thaliana
ttcacgcctttaagatc

SEQ ID NO: 161312 - DNA, 17 bp, Arabidopsis thaliana
ttcacgcgaataacgta

SEQ ID NO: 161313 - DNA, 17 bp, Arabidopsis thaliana
ttcacgcgccgccgtgt

SEQ ID NO: 161314 - DNA, 17 bp, Arabidopsis thaliana
ttcacgcgcttccaggg

SEQ ID NO: 161315 - DNA, 17 bp, Arabidopsis thaliana
ttcacgcggattacggt

SEQ ID NO: 161316 - DNA, 17 bp, Arabidopsis thaliana
ttcacggaattgtggcg

SEQ ID NO: 161317 - DNA, 17 bp, Arabidopsis thaliana
ttcacggatcttaacaa

SEQ ID NO: 161318 - DNA, 17 bp, Arabidopsis thaliana
ttcacggcatgtccgaa

SEQ ID NO: 161319 - DNA, 17 bp, Arabidopsis thaliana
ttcacggccggcttctt

SEQ ID NO: 161320 - DNA, 17 bp, Arabidopsis thaliana
ttcacggccggttagtc

SEQ ID NO: 161321 - DNA, 17 bp, Arabidopsis thaliana
ttcacggctaaccgcta

SEQ ID NO: 161322 - DNA, 17 bp, Arabidopsis thaliana
ttcacggctcgtgtatt

SEQ ID NO: 161323 - DNA, 17 bp, Arabidopsis thaliana
ttcacgggagttggcgg

SEQ ID NO: 161324 - DNA, 17 bp, Arabidopsis thaliana
ttcacggttgtgctcgt

SEQ ID NO: 161325 - DNA, 17 bp, Arabidopsis thaliana
ttcacgtcaaatctccc

SEQ ID NO: 161326 - DNA, 17 bp, Arabidopsis thaliana
ttcacgtcaaatcttgc

SEQ ID NO: 161327 - DNA, 17 bp, Arabidopsis thaliana
ttcacgtcgttgtttat

SEQ ID NO: 161328 - DNA, 17 bp, Arabidopsis thaliana
ttcacgtctgcctgggt

SEQ ID NO: 161329 - DNA, 17 bp, Arabidopsis thaliana
ttcacgtctgggggact

SEQ ID NO: 161330 - DNA, 17 bp, Arabidopsis thaliana
ttcacgtgcccatcttc

SEQ ID NO: 161331 - DNA, 17 bp, Arabidopsis thaliana
ttcactaaggctcttgg

SEQ ID NO: 161332 - DNA, 17 bp, Arabidopsis thaliana
ttcactaccgaacgatt

SEQ ID NO: 161333 - DNA, 17 bp, Arabidopsis thaliana
ttcactacctctggcgg

SEQ ID NO: 161334 - DNA, 17 bp, Arabidopsis thaliana
ttcactaccttaagctc

SEQ ID NO: 161335 - DNA, 17 bp, Arabidopsis thaliana
ttcactaggcttccaag

SEQ ID NO: 161336 - DNA, 17 bp, Arabidopsis thaliana
ttcactaggtctgaaca

SEQ ID NO: 161337 - DNA, 17 bp, Arabidopsis thaliana
ttcactagtttgggaag

SEQ ID NO: 161338 - DNA, 17 bp, Arabidopsis thaliana
ttcactatcttcgcgga

SEQ ID NO: 161339 - DNA, 17 bp, Arabidopsis thaliana
ttcactattagccaccg

SEQ ID NO: 161340 - DNA, 17 bp, Arabidopsis thaliana
ttcactcaccagaagag

SEQ ID NO: 161341 - DNA, 17 bp, Arabidopsis thaliana
ttcactccaaattgctg

SEQ ID NO: 161342 - DNA, 17 bp, Arabidopsis thaliana
ttcactcccgaattggg

SEQ ID NO: 161343 - DNA, 17 bp, Arabidopsis thaliana
ttcactccttactcgat

SEQ ID NO: 161344 - DNA, 17 bp, Arabidopsis thaliana
ttcactcgaccagtcac

SEQ ID NO: 161345 - DNA, 17 bp, Arabidopsis thaliana
ttcactcgaccgcagct

SEQ ID NO: 161346 - DNA, 17 bp, Arabidopsis thaliana
ttcactcgacgacggga

SEQ ID NO: 161347 - DNA, 17 bp, Arabidopsis thaliana
ttcactcgagttcctaa

SEQ ID NO: 161348 - DNA, 17 bp, Arabidopsis thaliana
ttcactctctgctgcat

SEQ ID NO: 161349 - DNA, 17 bp, Arabidopsis thaliana
ttcactctgcaaagctt

SEQ ID NO: 161350 - DNA, 17 bp, Arabidopsis thaliana
ttcactctgtccgctct

SEQ ID NO: 161351 - DNA, 17 bp, Arabidopsis thaliana
ttcactcttggcgatga

SEQ ID NO: 161352 - DNA, 17 bp, Arabidopsis thaliana
ttcactgaactcgaggc

SEQ ID NO: 161353 - DNA, 17 bp, Arabidopsis thaliana
ttcactgagattcagcc

SEQ ID NO: 161354 - DNA, 17 bp, Arabidopsis thaliana
ttcactgagctagctct

SEQ ID NO: 161355 - DNA, 17 bp, Arabidopsis thaliana
ttcactgatggcagtcc

SEQ ID NO: 161356 - DNA, 17 bp, Arabidopsis thaliana
ttcactgattagggttt

SEQ ID NO: 161357 - DNA, 17 bp, Arabidopsis thaliana
ttcactgcctcttccct

SEQ ID NO: 161358 - DNA, 17 bp, Arabidopsis thaliana
ttcactgcctgcactat

SEQ ID NO: 161359 - DNA, 17 bp, Arabidopsis thaliana
ttcactgcgatctcaaa

SEQ ID NO: 161360 - DNA, 17 bp, Arabidopsis thaliana
ttcactgcggaggatta

SEQ ID NO: 161361 - DNA, 17 bp, Arabidopsis thaliana
ttcactgctgcgccaag

SEQ ID NO: 161362 - DNA, 17 bp, Arabidopsis thaliana
ttcactgcttctttgag

SEQ ID NO: 161363 - DNA, 17 bp, Arabidopsis thaliana
ttcactggagagtcgat

SEQ ID NO: 161364 - DNA, 17 bp, Arabidopsis thaliana
ttcactggcttgttcac

SEQ ID NO: 161365 - DNA, 17 bp, Arabidopsis thaliana
ttcactggtgcgatgac

SEQ ID NO: 161366 - DNA, 17 bp, Arabidopsis thaliana
ttcactggtgcgatgat

SEQ ID NO: 161367 - DNA, 17 bp, Arabidopsis thaliana
ttcactggtgtgatgat

SEQ ID NO: 161368 - DNA, 17 bp, Arabidopsis thaliana
ttcactgttccctgaga

SEQ ID NO: 161369 - DNA, 17 bp, Arabidopsis thaliana
ttcactgttccctggga

SEQ ID NO: 161370 - DNA, 17 bp, Arabidopsis thaliana
ttcacttcggaggacta

SEQ ID NO: 161371 - DNA, 17 bp, Arabidopsis thaliana
ttcacttcgtcgttcgc

SEQ ID NO: 161372 - DNA, 17 bp, Arabidopsis thaliana
ttcacttggcctgtctt

SEQ ID NO: 161373 - DNA, 17 bp, Arabidopsis thaliana
ttcacttgggcttcaat

SEQ ID NO: 161374 - DNA, 17 bp, Arabidopsis thaliana
ttcacttgttgtgctca

SEQ ID NO: 161375 - DNA, 17 bp, Arabidopsis thaliana
ttcactttgctgtgctc

SEQ ID NO: 161376 - DNA, 17 bp, Arabidopsis thaliana
ttcactttgttgtgctc

SEQ ID NO: 161377 - DNA, 17 bp, Arabidopsis thaliana
ttcagaaaacgcggtaa

SEQ ID NO: 161378 - DNA, 17 bp, Arabidopsis thaliana
ttcagaacattatcagt

SEQ ID NO: 161379 - DNA, 17 bp, Arabidopsis thaliana
ttcagaaccttggattt

SEQ ID NO: 161380 - DNA, 17 bp, Arabidopsis thaliana
ttcagaatgtaccatat

SEQ ID NO: 161381 - DNA, 17 bp, Arabidopsis thaliana
ttcagaattcgtctcac

SEQ ID NO: 161382 - DNA, 17 bp, Arabidopsis thaliana
ttcagaatttagacccg

SEQ ID NO: 161383 - DNA, 17 bp, Arabidopsis thaliana
ttcagacagatttccga

SEQ ID NO: 161384 - DNA, 17 bp, Arabidopsis thaliana
ttcagacctggtgaaga

SEQ ID NO: 161385 - DNA, 17 bp, Arabidopsis thaliana
ttcagacctggtgacga

SEQ ID NO: 161386 - DNA, 17 bp, Arabidopsis thaliana
ttcagacctttgtcagt

SEQ ID NO: 161387 - DNA, 17 bp, Arabidopsis thaliana
ttcagacgcaagaagag

SEQ ID NO: 161388 - DNA, 17 bp, Arabidopsis thaliana
ttcagacgcaaggagag

SEQ ID NO: 161389 - DNA, 17 bp, Arabidopsis thaliana
ttcagacggatccagtg

SEQ ID NO: 161390 - DNA, 17 bp, Arabidopsis thaliana
ttcagacggattcacgg

SEQ ID NO: 161391 - DNA, 17 bp, Arabidopsis thaliana
ttcagacggtggaccat

SEQ ID NO: 161392 - DNA, 17 bp, Arabidopsis thaliana
ttcagactaaagaccat

SEQ ID NO: 161393 - DNA, 17 bp, Arabidopsis thaliana
ttcagactcggaaccag

SEQ ID NO: 161394 - DNA, 17 bp, Arabidopsis thaliana
ttcagactcgtttcgcg

SEQ ID NO: 161395 - DNA, 17 bp, Arabidopsis thaliana
ttcagactctgcctctg

SEQ ID NO: 161396 - DNA, 17 bp, Arabidopsis thaliana
ttcagactgagatttgt

SEQ ID NO: 161397 - DNA, 17 bp, Arabidopsis thaliana
ttcagactggtgatggc

SEQ ID NO: 161398 - DNA, 17 bp, Arabidopsis thaliana
ttcagactgtgaaacta

SEQ ID NO: 161399 - DNA, 17 bp, Arabidopsis thaliana
ttcagactgtgaaactg

SEQ ID NO: 161400 - DNA, 17 bp, Arabidopsis thaliana
ttcagactgtgaaactt

SEQ ID NO: 161401 - DNA, 17 bp, Arabidopsis thaliana
ttcagagacatatggac

SEQ ID NO: 161402 - DNA, 17 bp, Arabidopsis thaliana
ttcagagacccgggttc

SEQ ID NO: 161403 - DNA, 17 bp, Arabidopsis thaliana
ttcagagatttgtagat

SEQ ID NO: 161404 - DNA, 17 bp, Arabidopsis thaliana
ttcagagcactggtccg

SEQ ID NO: 161405 - DNA, 17 bp, Arabidopsis thaliana
ttcagagctagcacaga

SEQ ID NO: 161406 - DNA, 17 bp, Arabidopsis thaliana
ttcagaggtacaccgcg

SEQ ID NO: 161407 - DNA, 17 bp, Arabidopsis thaliana
ttcagagtccacatttg

SEQ ID NO: 161408 - DNA, 17 bp, Arabidopsis thaliana
ttcagagtcccggcgaa

SEQ ID NO: 161409 - DNA, 17 bp, Arabidopsis thaliana
ttcagagtggacttttc

SEQ ID NO: 161410 - DNA, 17 bp, Arabidopsis thaliana
ttcagatacctgcacgt

SEQ ID NO: 161411 - DNA, 17 bp, Arabidopsis thaliana
ttcagatacctgcccgt

SEQ ID NO: 161412 - DNA, 17 bp, Arabidopsis thaliana
ttcagatcaggtgacgt

SEQ ID NO: 161413 - DNA, 17 bp, Arabidopsis thaliana
ttcagatcccacagctg

SEQ ID NO: 161414 - DNA, 17 bp, Arabidopsis thaliana
ttcagatcccggctgcg

SEQ ID NO: 161415 - DNA, 17 bp, Arabidopsis thaliana
ttcagatctgagataga

SEQ ID NO: 161416 - DNA, 17 bp, Arabidopsis thaliana
ttcagatctggtggaga

SEQ ID NO: 161417 - DNA, 17 bp, Arabidopsis thaliana
ttcagatctgtcgctgc

SEQ ID NO: 161418 - DNA, 17 bp, Arabidopsis thaliana
ttcagatcttgttgcgg

SEQ ID NO: 161419 - DNA, 17 bp, Arabidopsis thaliana
ttcagatctttttcagt

SEQ ID NO: 161420 - DNA, 17 bp, Arabidopsis thaliana
ttcagatcttttttagt

SEQ ID NO: 161421 - DNA, 17 bp, Arabidopsis thaliana
ttcagatgagccagcgt

SEQ ID NO: 161422 - DNA, 17 bp, Arabidopsis thaliana
ttcagatggtgcggtga

SEQ ID NO: 161423 - DNA, 17 bp, Arabidopsis thaliana
ttcagattctttggccc

SEQ ID NO: 161424 - DNA, 17 bp, Arabidopsis thaliana
ttcagattgtggtttga

SEQ ID NO: 161425 - DNA, 17 bp, Arabidopsis thaliana
ttcagatttggttgctc

SEQ ID NO: 161426 - DNA, 17 bp, Arabidopsis thaliana
ttcagattttgacattg

SEQ ID NO: 161427 - DNA, 17 bp, Arabidopsis thaliana
ttcagcaagtttgttca

SEQ ID NO: 161428 - DNA, 17 bp, Arabidopsis thaliana
ttcagcaccaaccgagt

SEQ ID NO: 161429 - DNA, 17 bp, Arabidopsis thaliana
ttcagcacctccgacaa

SEQ ID NO: 161430 - DNA, 17 bp, Arabidopsis thaliana
ttcagcacgacgttttc

SEQ ID NO: 161431 - DNA, 17 bp, Arabidopsis thaliana
ttcagccaaaactttgc

SEQ ID NO: 161432 - DNA, 17 bp, Arabidopsis thaliana
ttcagccccttgtcgct

SEQ ID NO: 161433 - DNA, 17 bp, Arabidopsis thaliana
ttcagcccctttgtcgc

SEQ ID NO: 161434 - DNA, 17 bp, Arabidopsis thaliana
ttcagccctacccaccc

SEQ ID NO: 161435 - DNA, 17 bp, Arabidopsis thaliana
ttcagcccttccccccc

SEQ ID NO: 161436 - DNA, 17 bp, Arabidopsis thaliana
ttcagcccttcccccct

SEQ ID NO: 161437 - DNA, 17 bp, Arabidopsis thaliana
ttcagcccttcctccac

SEQ ID NO: 161438 - DNA, 17 bp, Arabidopsis thaliana
ttcagcccttcctccct

SEQ ID NO: 161439 - DNA, 17 bp, Arabidopsis thaliana
ttcagcccttctccctc

SEQ ID NO: 161440 - DNA, 17 bp, Arabidopsis thaliana
ttcagcccttgtcgcta

SEQ ID NO: 161441 - DNA, 17 bp, Arabidopsis thaliana
ttcagccctttctccct

SEQ ID NO: 161442 - DNA, 17 bp, Arabidopsis thaliana
ttcagccctttctcgct

SEQ ID NO: 161443 - DNA, 17 bp, Arabidopsis thaliana
ttcagccctttctctct

SEQ ID NO: 161444 - DNA, 17 bp, Arabidopsis thaliana
ttcagccctttgccccc

SEQ ID NO: 161445 - DNA, 17 bp, Arabidopsis thaliana
ttcagccctttgtccct

SEQ ID NO: 161446 - DNA, 17 bp, Arabidopsis thaliana
ttcagccctttgtcgct

SEQ ID NO: 161447 - DNA, 17 bp, Arabidopsis thaliana
ttcagccctttgtctct

SEQ ID NO: 161448 - DNA, 17 bp, Arabidopsis thaliana
ttcagccctttgtgcta

SEQ ID NO: 161449 - DNA, 17 bp, Arabidopsis thaliana
ttcagccctttgttgct

SEQ ID NO: 161450 - DNA, 17 bp, Arabidopsis thaliana
ttcagccctttttccct

SEQ ID NO: 161451 - DNA, 17 bp, Arabidopsis thaliana
ttcagccctttttcgct

SEQ ID NO: 161452 - DNA, 17 bp, Arabidopsis thaliana
ttcagcccttttttgat

SEQ ID NO: 161453 - DNA, 17 bp, Arabidopsis thaliana
ttcagccgaatctctat

SEQ ID NO: 161454 - DNA, 17 bp, Arabidopsis thaliana
ttcagccgtggtatgtc

SEQ ID NO: 161455 - DNA, 17 bp, Arabidopsis thaliana
ttcagcctgaccgttcc

SEQ ID NO: 161456 - DNA, 17 bp, Arabidopsis thaliana
ttcagcctggattgccg

SEQ ID NO: 161457 - DNA, 17 bp, Arabidopsis thaliana
ttcagcctgtcgctaag

SEQ ID NO: 161458 - DNA, 17 bp, Arabidopsis thaliana
ttcagccttagccctgt

SEQ ID NO: 161459 - DNA, 17 bp, Arabidopsis thaliana
ttcagcctttgtcgcta

SEQ ID NO: 161460 - DNA, 17 bp, Arabidopsis thaliana
ttcagccttttgtcgct

SEQ ID NO: 161461 - DNA, 17 bp, Arabidopsis thaliana
ttcagcgacatctccaa

SEQ ID NO: 161462 - DNA, 17 bp, Arabidopsis thaliana
ttcagcgaccaaaaact

SEQ ID NO: 161463 - DNA, 17 bp, Arabidopsis thaliana
ttcagcgactccatttt

SEQ ID NO: 161464 - DNA, 17 bp, Arabidopsis thaliana
ttcagcgatctgtttta

SEQ ID NO: 161465 - DNA, 17 bp, Arabidopsis thaliana
ttcagcgcagaacctct

SEQ ID NO: 161466 - DNA, 17 bp, Arabidopsis thaliana
ttcagcggatgatttgg

SEQ ID NO: 161467 - DNA, 17 bp, Arabidopsis thaliana
ttcagcggcagccagct

SEQ ID NO: 161468 - DNA, 17 bp, Arabidopsis thaliana
ttcagcggctcgtgcct

SEQ ID NO: 161469 - DNA, 17 bp, Arabidopsis thaliana
ttcagcgtcaactttaa

SEQ ID NO: 161470 - DNA, 17 bp, Arabidopsis thaliana
ttcaggaaaatattcgc

SEQ ID NO: 161471 - DNA, 17 bp, Arabidopsis thaliana
ttcaggaaaatgttcgc

SEQ ID NO: 161472 - DNA, 17 bp, Arabidopsis thaliana
ttcaggaaccgatttgc

SEQ ID NO: 161473 - DNA, 17 bp, Arabidopsis thaliana
ttcaggacttgatgaac

SEQ ID NO: 161474 - DNA, 17 bp, Arabidopsis thaliana
ttcaggagaatgggcat

SEQ ID NO: 161475 - DNA, 17 bp, Arabidopsis thaliana
ttcaggagtagaatttt

SEQ ID NO: 161476 - DNA, 17 bp, Arabidopsis thaliana
ttcaggatggccgagtg

SEQ ID NO: 161477 - DNA, 17 bp, Arabidopsis thaliana
ttcaggatgggtgacct

SEQ ID NO: 161478 - DNA, 17 bp, Arabidopsis thaliana
ttcaggcagccactgaa

SEQ ID NO: 161479 - DNA, 17 bp, Arabidopsis thaliana
ttcaggcattttcgtga

SEQ ID NO: 161480 - DNA, 17 bp, Arabidopsis thaliana
ttcaggcccgaaaccat

SEQ ID NO: 161481 - DNA, 17 bp, Arabidopsis thaliana
ttcaggcccttacgtgg

SEQ ID NO: 161482 - DNA, 17 bp, Arabidopsis thaliana
ttcaggcctagagaaat

SEQ ID NO: 161483 - DNA, 17 bp, Arabidopsis thaliana
ttcaggcggtgctggac

SEQ ID NO: 161484 - DNA, 17 bp, Arabidopsis thaliana
ttcaggcttcacttttc

SEQ ID NO: 161485 - DNA, 17 bp, Arabidopsis thaliana
ttcagggaccaggtgtt

SEQ ID NO: 161486 - DNA, 17 bp, Arabidopsis thaliana
ttcagggatctctaact

SEQ ID NO: 161487 - DNA, 17 bp, Arabidopsis thaliana
ttcagggcacgtctgcc

SEQ ID NO: 161488 - DNA, 17 bp, Arabidopsis thaliana
ttcagggctcgctgaaa

SEQ ID NO: 161489 - DNA, 17 bp, Arabidopsis thaliana
ttcaggggacgatgaat

SEQ ID NO: 161490 - DNA, 17 bp, Arabidopsis thaliana
ttcagggtcgaccgtct

SEQ ID NO: 161491 - DNA, 17 bp, Arabidopsis thaliana
ttcaggtcgccgcttgt

SEQ ID NO: 161492 - DNA, 17 bp, Arabidopsis thaliana
ttcaggtcgggctgagc

SEQ ID NO: 161493 - DNA, 17 bp, Arabidopsis thaliana
ttcaggtctaggaaaat

SEQ ID NO: 161494 - DNA, 17 bp, Arabidopsis thaliana
ttcaggtctcggtggga

SEQ ID NO: 161495 - DNA, 17 bp, Arabidopsis thaliana
ttcaggtctcggtgggg

SEQ ID NO: 161496 - DNA, 17 bp, Arabidopsis thaliana
ttcaggtctgggggact

SEQ ID NO: 161497 - DNA, 17 bp, Arabidopsis thaliana
ttcaggtgatcgagtga

SEQ ID NO: 161498 - DNA, 17 bp, Arabidopsis thaliana
ttcaggtgatcgagtgg

SEQ ID NO: 161499 - DNA, 17 bp, Arabidopsis thaliana
ttcaggtgccatgtaac

SEQ ID NO: 161500 - DNA, 17 bp, Arabidopsis thaliana
ttcaggtgtagcttgga

SEQ ID NO: 161501 - DNA, 17 bp, Arabidopsis thaliana
ttcaggttcaaaggcac

SEQ ID NO: 161502 - DNA, 17 bp, Arabidopsis thaliana
ttcaggttttcgttgtt

SEQ ID NO: 161503 - DNA, 17 bp, Arabidopsis thaliana
ttcaggtttttacatgt

SEQ ID NO: 161504 - DNA, 17 bp, Arabidopsis thaliana
ttcagtatcatggaagc

SEQ ID NO: 161505 - DNA, 17 bp, Arabidopsis thaliana
ttcagtattccgttcgc

SEQ ID NO: 161506 - DNA, 17 bp, Arabidopsis thaliana
ttcagtcaaagctacgg

SEQ ID NO: 161507 - DNA, 17 bp, Arabidopsis thaliana
ttcagtcacaaggagct

SEQ ID NO: 161508 - DNA, 17 bp, Arabidopsis thaliana
ttcagtcctttgtcgct

SEQ ID NO: 161509 - DNA, 17 bp, Arabidopsis thaliana
ttcagtcgtcagcgaca

SEQ ID NO: 161510 - DNA, 17 bp, Arabidopsis thaliana
ttcagtcgtctgttggc

SEQ ID NO: 161511 - DNA, 17 bp, Arabidopsis thaliana
ttcagtgaacccaagta

SEQ ID NO: 161512 - DNA, 17 bp, Arabidopsis thaliana
ttcagtgacaccattga

SEQ ID NO: 161513 - DNA, 17 bp, Arabidopsis thaliana
ttcagtgactaaggcga

SEQ ID NO: 161514 - DNA, 17 bp, Arabidopsis thaliana
ttcagtgactagagtcc

SEQ ID NO: 161515 - DNA, 17 bp, Arabidopsis thaliana
ttcagtgactctgagtc

SEQ ID NO: 161516 - DNA, 17 bp, Arabidopsis thaliana
ttcagtgatgaacgcta

SEQ ID NO: 161517 - DNA, 17 bp, Arabidopsis thaliana
ttcagtgcttggcacag

SEQ ID NO: 161518 - DNA, 17 bp, Arabidopsis thaliana
ttcagtggatccagaga

SEQ ID NO: 161519 - DNA, 17 bp, Arabidopsis thaliana
ttcagtgtaaatcccgc

SEQ ID NO: 161520 - DNA, 17 bp, Arabidopsis thaliana
ttcagtgttagagttca

SEQ ID NO: 161521 - DNA, 17 bp, Arabidopsis thaliana
ttcagttcccggctggt

SEQ ID NO: 161522 - DNA, 17 bp, Arabidopsis thaliana
ttcagttcctccatgtc

SEQ ID NO: 161523 - DNA, 17 bp, Arabidopsis thaliana
ttcagttctatcaagct

SEQ ID NO: 161524 - DNA, 17 bp, Arabidopsis thaliana
ttcagttctcggaacgc

SEQ ID NO: 161525 - DNA, 17 bp, Arabidopsis thaliana
ttcagttctcggaatgc

SEQ ID NO: 161526 - DNA, 17 bp, Arabidopsis thaliana
ttcagttctcggtagaa

SEQ ID NO: 161527 - DNA, 17 bp, Arabidopsis thaliana
ttcagttgaccagtccg

SEQ ID NO: 161528 - DNA, 17 bp, Arabidopsis thaliana
ttcagttgatgaccaat

SEQ ID NO: 161529 - DNA, 17 bp, Arabidopsis thaliana
ttcagttgccgtagacc

SEQ ID NO: 161530 - DNA, 17 bp, Arabidopsis thaliana
ttcagttgcctgtgttt

SEQ ID NO: 161531 - DNA, 17 bp, Arabidopsis thaliana
ttcagttgtagcttgga

SEQ ID NO: 161532 - DNA, 17 bp, Arabidopsis thaliana
ttcagtttcgcaacttt

SEQ ID NO: 161533 - DNA, 17 bp, Arabidopsis thaliana
ttcagtttctttgatga

SEQ ID NO: 161534 - DNA, 17 bp, Arabidopsis thaliana
ttcagtttgtgtgcgcg

SEQ ID NO: 161535 - DNA, 17 bp, Arabidopsis thaliana
ttcagtttgtgtgcgtg

SEQ ID NO: 161536 - DNA, 17 bp, Arabidopsis thaliana
ttcagtttgttactgct

SEQ ID NO: 161537 - DNA, 17 bp, Arabidopsis thaliana
ttcataaccatctgtcg

SEQ ID NO: 161538 - DNA, 17 bp, Arabidopsis thaliana
ttcataagcgctcaatt

SEQ ID NO: 161539 - DNA, 17 bp, Arabidopsis thaliana
ttcatactggatcagat

SEQ ID NO: 161540 - DNA, 17 bp, Arabidopsis thaliana
ttcatagcattgtgcca

SEQ ID NO: 161541 - DNA, 17 bp, Arabidopsis thaliana
ttcatagcgacgttgct

SEQ ID NO: 161542 - DNA, 17 bp, Arabidopsis thaliana
ttcataggatcgtgcca

SEQ ID NO: 161543 - DNA, 17 bp, Arabidopsis thaliana
ttcataggattgtgcca

SEQ ID NO: 161544 - DNA, 17 bp, Arabidopsis thaliana
ttcatagtccaactttc

SEQ ID NO: 161545 - DNA, 17 bp, Arabidopsis thaliana
ttcatatccatttgatc

SEQ ID NO: 161546 - DNA, 17 bp, Arabidopsis thaliana
ttcatcaaagctcttgc

SEQ ID NO: 161547 - DNA, 17 bp, Arabidopsis thaliana
ttcatcaactgcatttt

SEQ ID NO: 161548 - DNA, 17 bp, Arabidopsis thaliana
ttcatcaatttgggatt

SEQ ID NO: 161549 - DNA, 17 bp, Arabidopsis thaliana
ttcatcaccagggttca

SEQ ID NO: 161550 - DNA, 17 bp, Arabidopsis thaliana
ttcatcacggctactgt

SEQ ID NO: 161551 - DNA, 17 bp, Arabidopsis thaliana
ttcatcacggtatccat

SEQ ID NO: 161552 - DNA, 17 bp, Arabidopsis thaliana
ttcatcagcatgaccga

SEQ ID NO: 161553 - DNA, 17 bp, Arabidopsis thaliana
ttcatcaggtgactgcg

SEQ ID NO: 161554 - DNA, 17 bp, Arabidopsis thaliana
ttcatcaggtgactggc

SEQ ID NO: 161555 - DNA, 17 bp, Arabidopsis thaliana
ttcatcaggtgactggg

SEQ ID NO: 161556 - DNA, 17 bp, Arabidopsis thaliana
ttcatcatgcatggcgc

SEQ ID NO: 161557 - DNA, 17 bp, Arabidopsis thaliana
ttcatccaacgttcggc

SEQ ID NO: 161558 - DNA, 17 bp, Arabidopsis thaliana
ttcatccacacttgcct

SEQ ID NO: 161559 - DNA, 17 bp, Arabidopsis thaliana
ttcatccacttaatcag

SEQ ID NO: 161560 - DNA, 17 bp, Arabidopsis thaliana
ttcatccagtgacactt

SEQ ID NO: 161561 - DNA, 17 bp, Arabidopsis thaliana
ttcatccagttgtcgtt

SEQ ID NO: 161562 - DNA, 17 bp, Arabidopsis thaliana
ttcatcccacagttgtc

SEQ ID NO: 161563 - DNA, 17 bp, Arabidopsis thaliana
ttcatcccacttctgac

SEQ ID NO: 161564 - DNA, 17 bp, Arabidopsis thaliana
ttcatccgctattcttg

SEQ ID NO: 161565 - DNA, 17 bp, Arabidopsis thaliana
ttcatccggctatgttt

SEQ ID NO: 161566 - DNA, 17 bp, Arabidopsis thaliana
ttcatccggtgaggctc

SEQ ID NO: 161567 - DNA, 17 bp, Arabidopsis thaliana
ttcatccggttcgactg

SEQ ID NO: 161568 - DNA, 17 bp, Arabidopsis thaliana
ttcatccggttgcggat

SEQ ID NO: 161569 - DNA, 17 bp, Arabidopsis thaliana
ttcatccggttgggctc

SEQ ID NO: 161570 - DNA, 17 bp, Arabidopsis thaliana
ttcatccgtatgctcta

SEQ ID NO: 161571 - DNA, 17 bp, Arabidopsis thaliana
ttcatccgtgacaagtg

SEQ ID NO: 161572 - DNA, 17 bp, Arabidopsis thaliana
ttcatcctaccaagacc

SEQ ID NO: 161573 - DNA, 17 bp, Arabidopsis thaliana
ttcatcgaccgggtcca

SEQ ID NO: 161574 - DNA, 17 bp, Arabidopsis thaliana
ttcatcgaccgtgtccg

SEQ ID NO: 161575 - DNA, 17 bp, Arabidopsis thaliana
ttcatcgactggacgtc

SEQ ID NO: 161576 - DNA, 17 bp, Arabidopsis thaliana
ttcatcgatggtcggca

SEQ ID NO: 161577 - DNA, 17 bp, Arabidopsis thaliana
ttcatcgcaatggctat

SEQ ID NO: 161578 - DNA, 17 bp, Arabidopsis thaliana
ttcatcgccagttccga

SEQ ID NO: 161579 - DNA, 17 bp, Arabidopsis thaliana
ttcatcgcctagagaag

SEQ ID NO: 161580 - DNA, 17 bp, Arabidopsis thaliana
ttcatcgcggtttcttc

SEQ ID NO: 161581 - DNA, 17 bp, Arabidopsis thaliana
ttcatcgctacgcagat

SEQ ID NO: 161582 - DNA, 17 bp, Arabidopsis thaliana
ttcatcgctgggtctca

SEQ ID NO: 161583 - DNA, 17 bp, Arabidopsis thaliana
ttcatcggagaagtgac

SEQ ID NO: 161584 - DNA, 17 bp, Arabidopsis thaliana
ttcatcggatattgttg

SEQ ID NO: 161585 - DNA, 17 bp, Arabidopsis thaliana
ttcatcggctatcatcg

SEQ ID NO: 161586 - DNA, 17 bp, Arabidopsis thaliana
ttcatcgggaatgtgcc

SEQ ID NO: 161587 - DNA, 17 bp, Arabidopsis thaliana
ttcatcgtgatggggat

SEQ ID NO: 161588 - DNA, 17 bp, Arabidopsis thaliana
ttcatctacggagtcgg

SEQ ID NO: 161589 - DNA, 17 bp, Arabidopsis thaliana
ttcatctacttgctcga

SEQ ID NO: 161590 - DNA, 17 bp, Arabidopsis thaliana
ttcatctaggcccattt

SEQ ID NO: 161591 - DNA, 17 bp, Arabidopsis thaliana
ttcatctcacgtgttgc

SEQ ID NO: 161592 - DNA, 17 bp, Arabidopsis thaliana
ttcatctcctgttgcag

SEQ ID NO: 161593 - DNA, 17 bp, Arabidopsis thaliana
ttcatctctcaggtgtc

SEQ ID NO: 161594 - DNA, 17 bp, Arabidopsis thaliana
ttcatctctgcgtgctg

SEQ ID NO: 161595 - DNA, 17 bp, Arabidopsis thaliana
ttcatctctgggcactt

SEQ ID NO: 161596 - DNA, 17 bp, Arabidopsis thaliana
ttcatctctggtctctg

SEQ ID NO: 161597 - DNA, 17 bp, Arabidopsis thaliana
ttcatcttagcgatgtc

SEQ ID NO: 161598 - DNA, 17 bp, Arabidopsis thaliana
ttcatctttgccgcagc

SEQ ID NO: 161599 - DNA, 17 bp, Arabidopsis thaliana
ttcatgaccatcaccgg

SEQ ID NO: 161600 - DNA, 17 bp, Arabidopsis thaliana
ttcatgactttccatga

SEQ ID NO: 161601 - DNA, 17 bp, Arabidopsis thaliana
ttcatgagccgcctgtc

SEQ ID NO: 161602 - DNA, 17 bp, Arabidopsis thaliana
ttcatgaggaagcttgc

SEQ ID NO: 161603 - DNA, 17 bp, Arabidopsis thaliana
ttcatggaccgtgtggt

SEQ ID NO: 161604 - DNA, 17 bp, Arabidopsis thaliana
ttcatggactttgataa

SEQ ID NO: 161605 - DNA, 17 bp, Arabidopsis thaliana
ttcatggcgtactgcga

SEQ ID NO: 161606 - DNA, 17 bp, Arabidopsis thaliana
ttcatgtcagcattcta

SEQ ID NO: 161607 - DNA, 17 bp, Arabidopsis thaliana
ttcatgtcccaagccga

SEQ ID NO: 161608 - DNA, 17 bp, Arabidopsis thaliana
ttcatgtctcggtggga

SEQ ID NO: 161609 - DNA, 17 bp, Arabidopsis thaliana
ttcatgtctgcattcta

SEQ ID NO: 161610 - DNA, 17 bp, Arabidopsis thaliana
ttcatgtgttatgatct

SEQ ID NO: 161611 - DNA, 17 bp, Arabidopsis thaliana
ttcattaacgacttcca

SEQ ID NO: 161612 - DNA, 17 bp, Arabidopsis thaliana
ttcattaccgcctccct

SEQ ID NO: 161613 - DNA, 17 bp, Arabidopsis thaliana
ttcattagccgctaaac

SEQ ID NO: 161614 - DNA, 17 bp, Arabidopsis thaliana
ttcattcccgaccacag

SEQ ID NO: 161615 - DNA, 17 bp, Arabidopsis thaliana
ttcattccctcgcaggc

SEQ ID NO: 161616 - DNA, 17 bp, Arabidopsis thaliana
ttcattcggctgagtct

SEQ ID NO: 161617 - DNA, 17 bp, Arabidopsis thaliana
ttcattctctacttcat

SEQ ID NO: 161618 - DNA, 17 bp, Arabidopsis thaliana
ttcattctctggatctg

SEQ ID NO: 161619 - DNA, 17 bp, Arabidopsis thaliana
ttcattctctggtgcgt

SEQ ID NO: 161620 - DNA, 17 bp, Arabidopsis thaliana
ttcattgacttcttgtc

SEQ ID NO: 161621 - DNA, 17 bp, Arabidopsis thaliana
ttcattgatcaacgaat

SEQ ID NO: 161622 - DNA, 17 bp, Arabidopsis thaliana
ttcattgcggcggagga

SEQ ID NO: 161623 - DNA, 17 bp, Arabidopsis thaliana
ttcattgcgtcgagcta

SEQ ID NO: 161624 - DNA, 17 bp, Arabidopsis thaliana
ttcattgctaaaccgtg

SEQ ID NO: 161625 - DNA, 17 bp, Arabidopsis thaliana
ttcattgctcagatcac

SEQ ID NO: 161626 - DNA, 17 bp, Arabidopsis thaliana
ttcattggaaaccctag

SEQ ID NO: 161627 - DNA, 17 bp, Arabidopsis thaliana
ttcattggcacgactct

SEQ ID NO: 161628 - DNA, 17 bp, Arabidopsis thaliana
ttcattggccatgagaa

SEQ ID NO: 161629 - DNA, 17 bp, Arabidopsis thaliana
ttcattggctggttttc

SEQ ID NO: 161630 - DNA, 17 bp, Arabidopsis thaliana
ttcattgggtattgcca

SEQ ID NO: 161631 - DNA, 17 bp, Arabidopsis thaliana
ttcattggtcggcttgt

SEQ ID NO: 161632 - DNA, 17 bp, Arabidopsis thaliana
ttcattgtaggcaccgc

SEQ ID NO: 161633 - DNA, 17 bp, Arabidopsis thaliana
ttcatttaaccgggatt

SEQ ID NO: 161634 - DNA, 17 bp, Arabidopsis thaliana
ttcatttaccatcgcag

SEQ ID NO: 161635 - DNA, 17 bp, Arabidopsis thaliana
ttcatttcagcgaaatc

SEQ ID NO: 161636 - DNA, 17 bp, Arabidopsis thaliana
ttcatttcccctggtgc

SEQ ID NO: 161637 - DNA, 17 bp, Arabidopsis thaliana
ttcatttcccggctggt

SEQ ID NO: 161638 - DNA, 17 bp, Arabidopsis thaliana
ttcatttccctacggtg

SEQ ID NO: 161639 - DNA, 17 bp, Arabidopsis thaliana
ttcatttcgggtttggt

SEQ ID NO: 161640 - DNA, 17 bp, Arabidopsis thaliana
ttcatttctcggaacgc

SEQ ID NO: 161641 - DNA, 17 bp, Arabidopsis thaliana
ttcatttctcggaatgc

SEQ ID NO: 161642 - DNA, 17 bp, Arabidopsis thaliana
ttcatttctcggtagaa

SEQ ID NO: 161643 - DNA, 17 bp, Arabidopsis thaliana
ttcatttctcggtagca

SEQ ID NO: 161644 - DNA, 17 bp, Arabidopsis thaliana
ttcatttctgcgagttt

SEQ ID NO: 161645 - DNA, 17 bp, Arabidopsis thaliana
ttcatttgagtcacggg

SEQ ID NO: 161646 - DNA, 17 bp, Arabidopsis thaliana
ttcatttgcctgtcgct

SEQ ID NO: 161647 - DNA, 17 bp, Arabidopsis thaliana
ttcatttgcggacatgc

SEQ ID NO: 161648 - DNA, 17 bp, Arabidopsis thaliana
ttcatttgctgtgctca

SEQ ID NO: 161649 - DNA, 17 bp, Arabidopsis thaliana
ttcatttggttgctctt

SEQ ID NO: 161650 - DNA, 17 bp, Arabidopsis thaliana
ttcatttgtgtggacca

SEQ ID NO: 161651 - DNA, 17 bp, Arabidopsis thaliana
ttcatttgtgtggcgag

SEQ ID NO: 161652 - DNA, 17 bp, Arabidopsis thaliana
ttcattttgctgtgctt

SEQ ID NO: 161653 - DNA, 17 bp, Arabidopsis thaliana
ttcattttgggtgttgc

SEQ ID NO: 161654 - DNA, 17 bp, Arabidopsis thaliana
ttccaaacacattgtcg

SEQ ID NO: 161655 - DNA, 17 bp, Arabidopsis thaliana
ttccaaactataaacgg

SEQ ID NO: 161656 - DNA, 17 bp, Arabidopsis thaliana
ttccaaactcaggacag

SEQ ID NO: 161657 - DNA, 17 bp, Arabidopsis thaliana
ttccaaactccaaatga

SEQ ID NO: 161658 - DNA, 17 bp, Arabidopsis thaliana
ttccaaactccaaatgt

SEQ ID NO: 161659 - DNA, 17 bp, Arabidopsis thaliana
ttccaaactcgggacag

SEQ ID NO: 161660 - DNA, 17 bp, Arabidopsis thaliana
ttccaaagcacactctt

SEQ ID NO: 161661 - DNA, 17 bp, Arabidopsis thaliana
ttccaaagcattgcgat

SEQ ID NO: 161662 - DNA, 17 bp, Arabidopsis thaliana
ttccaaagcgatcacaa

SEQ ID NO: 161663 - DNA, 17 bp, Arabidopsis thaliana
ttccaaagtggctgata

SEQ ID NO: 161664 - DNA, 17 bp, Arabidopsis thaliana
ttccaaatagtgactgc

SEQ ID NO: 161665 - DNA, 17 bp, Arabidopsis thaliana
ttccaaatcctacagag

SEQ ID NO: 161666 - DNA, 17 bp, Arabidopsis thaliana
ttccaaattcgagataa

SEQ ID NO: 161667 - DNA, 17 bp, Arabidopsis thaliana
ttccaaattcggctcag

SEQ ID NO: 161668 - DNA, 17 bp, Arabidopsis thaliana
ttccaacatgaaggacg

SEQ ID NO: 161669 - DNA, 17 bp, Arabidopsis thaliana
ttccaaccatgtcggga

SEQ ID NO: 161670 - DNA, 17 bp, Arabidopsis thaliana
ttccaaccccagaagcg

SEQ ID NO: 161671 - DNA, 17 bp, Arabidopsis thaliana
ttccaaccgaatgacca

SEQ ID NO: 161672 - DNA, 17 bp, Arabidopsis thaliana
ttccaaccttttcctgg

SEQ ID NO: 161673 - DNA, 17 bp, Arabidopsis thaliana
ttccaacggacgttgaa

SEQ ID NO: 161674 - DNA, 17 bp, Arabidopsis thaliana
ttccaactccaggattt

SEQ ID NO: 161675 - DNA, 17 bp, Arabidopsis thaliana
ttccaacttattctcca

SEQ ID NO: 161676 - DNA, 17 bp, Arabidopsis thaliana
ttccaacttcaggattt

SEQ ID NO: 161677 - DNA, 17 bp, Arabidopsis thaliana
ttccaagaagcttctca

SEQ ID NO: 161678 - DNA, 17 bp, Arabidopsis thaliana
ttccaagaccacatcaa

SEQ ID NO: 161679 - DNA, 17 bp, Arabidopsis thaliana
ttccaagactcggatgt

SEQ ID NO: 161680 - DNA, 17 bp, Arabidopsis thaliana
ttccaagactcggctga

SEQ ID NO: 161681 - DNA, 17 bp, Arabidopsis thaliana
ttccaagcagtagacca

SEQ ID NO: 161682 - DNA, 17 bp, Arabidopsis thaliana
ttccaagccatccagtg

SEQ ID NO: 161683 - DNA, 17 bp, Arabidopsis thaliana
ttccaagcccaagaagg

SEQ ID NO: 161684 - DNA, 17 bp, Arabidopsis thaliana
ttccaagctttgggtgt

SEQ ID NO: 161685 - DNA, 17 bp, Arabidopsis thaliana
ttccaaggaaaccgata

SEQ ID NO: 161686 - DNA, 17 bp, Arabidopsis thaliana
ttccaaggaccatcgtt

SEQ ID NO: 161687 - DNA, 17 bp, Arabidopsis thaliana
ttccaaggatgttcagg

SEQ ID NO: 161688 - DNA, 17 bp, Arabidopsis thaliana
ttccaaggctcgcttcg

SEQ ID NO: 161689 - DNA, 17 bp, Arabidopsis thaliana
ttccaaggctgcattga

SEQ ID NO: 161690 - DNA, 17 bp, Arabidopsis thaliana
ttccaagggttgggctg

SEQ ID NO: 161691 - DNA, 17 bp, Arabidopsis thaliana
ttccaagggttttggga

SEQ ID NO: 161692 - DNA, 17 bp, Arabidopsis thaliana
ttccaaggtgcggctgc

SEQ ID NO: 161693 - DNA, 17 bp, Arabidopsis thaliana
ttccaaggtggtgtgat

SEQ ID NO: 161694 - DNA, 17 bp, Arabidopsis thaliana
ttccaaggttgctagca

SEQ ID NO: 161695 - DNA, 17 bp, Arabidopsis thaliana
ttccaaggtttcatgtt

SEQ ID NO: 161696 - DNA, 17 bp, Arabidopsis thaliana
ttccaagtccggatcga

SEQ ID NO: 161697 - DNA, 17 bp, Arabidopsis thaliana
ttccaagtgttaggttc

SEQ ID NO: 161698 - DNA, 17 bp, Arabidopsis thaliana
ttccaagtttggctcca

SEQ ID NO: 161699 - DNA, 17 bp, Arabidopsis thaliana
ttccaagtttggttcaa

SEQ ID NO: 161700 - DNA, 17 bp, Arabidopsis thaliana
ttccaagttttttccca

SEQ ID NO: 161701 - DNA, 17 bp, Arabidopsis thaliana
ttccaatcgattgcttg

SEQ ID NO: 161702 - DNA, 17 bp, Arabidopsis thaliana
ttccaatctctccaaga

SEQ ID NO: 161703 - DNA, 17 bp, Arabidopsis thaliana
ttccaatcttcatcggt

SEQ ID NO: 161704 - DNA, 17 bp, Arabidopsis thaliana
ttccaatggccgccagg

SEQ ID NO: 161705 - DNA, 17 bp, Arabidopsis thaliana
ttccaatgtccgtgctg

SEQ ID NO: 161706 - DNA, 17 bp, Arabidopsis thaliana
ttccaatgtttgtccga

SEQ ID NO: 161707 - DNA, 17 bp, Arabidopsis thaliana
ttccacaacccgaactg

SEQ ID NO: 161708 - DNA, 17 bp, Arabidopsis thaliana
ttccacaactggatgtg

SEQ ID NO: 161709 - DNA, 17 bp, Arabidopsis thaliana
ttccacaacttgacaca

SEQ ID NO: 161710 - DNA, 17 bp, Arabidopsis thaliana
ttccacaaggtctaagc

SEQ ID NO: 161711 - DNA, 17 bp, Arabidopsis thaliana
ttccacaagttaatttc

SEQ ID NO: 161712 - DNA, 17 bp, Arabidopsis thaliana
ttccacaatgtgtatga

SEQ ID NO: 161713 - DNA, 17 bp, Arabidopsis thaliana
ttccacacgagatttct

SEQ ID NO: 161714 - DNA, 17 bp, Arabidopsis thaliana
ttccacagagattttac

SEQ ID NO: 161715 - DNA, 17 bp, Arabidopsis thaliana
ttccacagagtgtccga

SEQ ID NO: 161716 - DNA, 17 bp, Arabidopsis thaliana
ttccacagccttcttga

SEQ ID NO: 161717 - DNA, 17 bp, Arabidopsis thaliana
ttccacagctctttgaa

SEQ ID NO: 161718 - DNA, 17 bp, Arabidopsis thaliana
ttccacagcttcttgaa

SEQ ID NO: 161719 - DNA, 17 bp, Arabidopsis thaliana
ttccacagctttctcga

SEQ ID NO: 161720 - DNA, 17 bp, Arabidopsis thaliana
ttccacagctttcttaa

SEQ ID NO: 161721 - DNA, 17 bp, Arabidopsis thaliana
ttccacagctttcttca

SEQ ID NO: 161722 - DNA, 17 bp, Arabidopsis thaliana
ttccacagctttcttga

SEQ ID NO: 161723 - DNA, 17 bp, Arabidopsis thaliana
ttccacagctttcttgc

SEQ ID NO: 161724 - DNA, 17 bp, Arabidopsis thaliana
ttccacagtttcctctg

SEQ ID NO: 161725 - DNA, 17 bp, Arabidopsis thaliana
ttccaccaactgaccat

SEQ ID NO: 161726 - DNA, 17 bp, Arabidopsis thaliana
ttccaccatcgctagtt

SEQ ID NO: 161727 - DNA, 17 bp, Arabidopsis thaliana
ttccacccggatgatcg

SEQ ID NO: 161728 - DNA, 17 bp, Arabidopsis thaliana
ttccaccgaagttgctt

SEQ ID NO: 161729 - DNA, 17 bp, Arabidopsis thaliana
ttccaccgactgaagtt

SEQ ID NO: 161730 - DNA, 17 bp, Arabidopsis thaliana
ttccaccgtctgtatga

SEQ ID NO: 161731 - DNA, 17 bp, Arabidopsis thaliana
ttccacgagggcgattc

SEQ ID NO: 161732 - DNA, 17 bp, Arabidopsis thaliana
ttccacggaagaggtgg

SEQ ID NO: 161733 - DNA, 17 bp, Arabidopsis thaliana
ttccacggatgtttggc

SEQ ID NO: 161734 - DNA, 17 bp, Arabidopsis thaliana
ttccacgggatctatgt

SEQ ID NO: 161735 - DNA, 17 bp, Arabidopsis thaliana
ttccacgggtttacgtt

SEQ ID NO: 161736 - DNA, 17 bp, Arabidopsis thaliana
ttccacgtctgcctggg

SEQ ID NO: 161737 - DNA, 17 bp, Arabidopsis thaliana
ttccacgttttacaagt

SEQ ID NO: 161738 - DNA, 17 bp, Arabidopsis thaliana
ttccactaagattatca

SEQ ID NO: 161739 - DNA, 17 bp, Arabidopsis thaliana
ttccactaagcagattt

SEQ ID NO: 161740 - DNA, 17 bp, Arabidopsis thaliana
ttccactattgcagcat

SEQ ID NO: 161741 - DNA, 17 bp, Arabidopsis thaliana
ttccactcatcctggaa

SEQ ID NO: 161742 - DNA, 17 bp, Arabidopsis thaliana
ttccactcatcctggag

SEQ ID NO: 161743 - DNA, 17 bp, Arabidopsis thaliana
ttccactctgctccctt

SEQ ID NO: 161744 - DNA, 17 bp, Arabidopsis thaliana
ttccactgcccactctg

SEQ ID NO: 161745 - DNA, 17 bp, Arabidopsis thaliana
ttccactgctctatctg

SEQ ID NO: 161746 - DNA, 17 bp, Arabidopsis thaliana
ttccacttctcctcgat

SEQ ID NO: 161747 - DNA, 17 bp, Arabidopsis thaliana
ttccacttcttcggatc

SEQ ID NO: 161748 - DNA, 17 bp, Arabidopsis thaliana
ttccactttggtgattg

SEQ ID NO: 161749 - DNA, 17 bp, Arabidopsis thaliana
ttccagacagatttcaa

SEQ ID NO: 161750 - DNA, 17 bp, Arabidopsis thaliana
ttccagacatatcctcc

SEQ ID NO: 161751 - DNA, 17 bp, Arabidopsis thaliana
ttccagacctgggttcg

SEQ ID NO: 161752 - DNA, 17 bp, Arabidopsis thaliana
ttccagactgttcagac

SEQ ID NO: 161753 - DNA, 17 bp, Arabidopsis thaliana
ttccagagatagtctca

SEQ ID NO: 161754 - DNA, 17 bp, Arabidopsis thaliana
ttccagagattcgtggc

SEQ ID NO: 161755 - DNA, 17 bp, Arabidopsis thaliana
ttccagagctggacagg

SEQ ID NO: 161756 - DNA, 17 bp, Arabidopsis thaliana
ttccagaggttcttcca

SEQ ID NO: 161757 - DNA, 17 bp, Arabidopsis thaliana
ttccagagtcatggccg

SEQ ID NO: 161758 - DNA, 17 bp, Arabidopsis thaliana
ttccagagtcgtacgag

SEQ ID NO: 161759 - DNA, 17 bp, Arabidopsis thaliana
ttccagatcgcgcatat

SEQ ID NO: 161760 - DNA, 17 bp, Arabidopsis thaliana
ttccagatctgatccag

SEQ ID NO: 161761 - DNA, 17 bp, Arabidopsis thaliana
ttccagcagcagtcgcg

SEQ ID NO: 161762 - DNA, 17 bp, Arabidopsis thaliana
ttccagcagtgggattg

SEQ ID NO: 161763 - DNA, 17 bp, Arabidopsis thaliana
ttccagccgattgacga

SEQ ID NO: 161764 - DNA, 17 bp, Arabidopsis thaliana
ttccagcgctagataca

SEQ ID NO: 161765 - DNA, 17 bp, Arabidopsis thaliana
ttccagcgtctacggaa

SEQ ID NO: 161766 - DNA, 17 bp, Arabidopsis thaliana
ttccagcgttctatagt

SEQ ID NO: 161767 - DNA, 17 bp, Arabidopsis thaliana
ttccagcgttgatttcg

SEQ ID NO: 161768 - DNA, 17 bp, Arabidopsis thaliana
ttccagctctgggtcct

SEQ ID NO: 161769 - DNA, 17 bp, Arabidopsis thaliana
ttccagcttgttccagc

SEQ ID NO: 161770 - DNA, 17 bp, Arabidopsis thaliana
ttccaggaccaaaccac

SEQ ID NO: 161771 - DNA, 17 bp, Arabidopsis thaliana
ttccaggaccaaacccc

SEQ ID NO: 161772 - DNA, 17 bp, Arabidopsis thaliana
ttccaggagttttgata

SEQ ID NO: 161773 - DNA, 17 bp, Arabidopsis thaliana
ttccaggattcggttgc

SEQ ID NO: 161774 - DNA, 17 bp, Arabidopsis thaliana
ttccaggctgagcacaa

SEQ ID NO: 161775 - DNA, 17 bp, Arabidopsis thaliana
ttccaggctgagcacca

SEQ ID NO: 161776 - DNA, 17 bp, Arabidopsis thaliana
ttccagggaacctattc

SEQ ID NO: 161777 - DNA, 17 bp, Arabidopsis thaliana
ttccagggaggatcgaa

SEQ ID NO: 161778 - DNA, 17 bp, Arabidopsis thaliana
ttccagggttatctccc

SEQ ID NO: 161779 - DNA, 17 bp, Arabidopsis thaliana
ttccaggtctccaaggt

SEQ ID NO: 161780 - DNA, 17 bp, Arabidopsis thaliana
ttccaggtgttttctcg

SEQ ID NO: 161781 - DNA, 17 bp, Arabidopsis thaliana
ttccaggtttcggcggg

SEQ ID NO: 161782 - DNA, 17 bp, Arabidopsis thaliana
ttccagtagttgggact

SEQ ID NO: 161783 - DNA, 17 bp, Arabidopsis thaliana
ttccagtcgagttagtt

SEQ ID NO: 161784 - DNA, 17 bp, Arabidopsis thaliana
ttccagtctgagggtct

SEQ ID NO: 161785 - DNA, 17 bp, Arabidopsis thaliana
ttccagtgactcttctc

SEQ ID NO: 161786 - DNA, 17 bp, Arabidopsis thaliana
ttccagtgctagaccga

SEQ ID NO: 161787 - DNA, 17 bp, Arabidopsis thaliana
ttccagtggctaaccag

SEQ ID NO: 161788 - DNA, 17 bp, Arabidopsis thaliana
ttccagtgggcggaaag

SEQ ID NO: 161789 - DNA, 17 bp, Arabidopsis thaliana
ttccagtttcagtgatg

SEQ ID NO: 161790 - DNA, 17 bp, Arabidopsis thaliana
ttccagtttcgatacgt

SEQ ID NO: 161791 - DNA, 17 bp, Arabidopsis thaliana
ttccagtttcgttttga

SEQ ID NO: 161792 - DNA, 17 bp, Arabidopsis thaliana
ttccatcacgatggatg

SEQ ID NO: 161793 - DNA, 17 bp, Arabidopsis thaliana
ttccatcctcaactgtg

SEQ ID NO: 161794 - DNA, 17 bp, Arabidopsis thaliana
ttccatcgaccagaggc

SEQ ID NO: 161795 - DNA, 17 bp, Arabidopsis thaliana
ttccatcgccatctttg

SEQ ID NO: 161796 - DNA, 17 bp, Arabidopsis thaliana
ttccatcggagagatgt

SEQ ID NO: 161797 - DNA, 17 bp, Arabidopsis thaliana
ttccatgagcggtaatg

SEQ ID NO: 161798 - DNA, 17 bp, Arabidopsis thaliana
ttccatgaggttctggg

SEQ ID NO: 161799 - DNA, 17 bp, Arabidopsis thaliana
ttccatgagtggttttg

SEQ ID NO: 161800 - DNA, 17 bp, Arabidopsis thaliana
ttccatgatttgtagcg

SEQ ID NO: 161801 - DNA, 17 bp, Arabidopsis thaliana
ttccatgccgagcagaa

SEQ ID NO: 161802 - DNA, 17 bp, Arabidopsis thaliana
ttccatgcgtcataagc

SEQ ID NO: 161803 - DNA, 17 bp, Arabidopsis thaliana
ttccatgctaggatcct

SEQ ID NO: 161804 - DNA, 17 bp, Arabidopsis thaliana
ttccatggaatagcggc

SEQ ID NO: 161805 - DNA, 17 bp, Arabidopsis thaliana
ttccatggatgggtctg

SEQ ID NO: 161806 - DNA, 17 bp, Arabidopsis thaliana
ttccatgtctgataatc

SEQ ID NO: 161807 - DNA, 17 bp, Arabidopsis thaliana
ttccatgtgaacggcac

SEQ ID NO: 161808 - DNA, 17 bp, Arabidopsis thaliana
ttccattcagaccacat

SEQ ID NO: 161809 - DNA, 17 bp, Arabidopsis thaliana
ttccattgaccaatgtg

SEQ ID NO: 161810 - DNA, 17 bp, Arabidopsis thaliana
ttccattgacttttcgt

SEQ ID NO: 161811 - DNA, 17 bp, Arabidopsis thaliana
ttccattgactttttgt

SEQ ID NO: 161812 - DNA, 17 bp, Arabidopsis thaliana
ttccatttctctacgct

SEQ ID NO: 161813 - DNA, 17 bp, Arabidopsis thaliana
ttccatttgaggcactt

SEQ ID NO: 161814 - DNA, 17 bp, Arabidopsis thaliana
ttccatttgtcgcagcg

SEQ ID NO: 161815 - DNA, 17 bp, Arabidopsis thaliana
ttccattttcgtgattt

SEQ ID NO: 161816 - DNA, 17 bp, Arabidopsis thaliana
ttcccaaatttgaaagc

SEQ ID NO: 161817 - DNA, 17 bp, Arabidopsis thaliana
ttcccaacagaatagcc

SEQ ID NO: 161818 - DNA, 17 bp, Arabidopsis thaliana
ttcccaactgacatgtg

SEQ ID NO: 161819 - DNA, 17 bp, Arabidopsis thaliana
ttcccaagaatctgtca

SEQ ID NO: 161820 - DNA, 17 bp, Arabidopsis thaliana
ttcccaagatctctgga

SEQ ID NO: 161821 - DNA, 17 bp, Arabidopsis thaliana
ttcccaaggaagtttga

SEQ ID NO: 161822 - DNA, 17 bp, Arabidopsis thaliana
ttcccaaggatgacttg

SEQ ID NO: 161823 - DNA, 17 bp, Arabidopsis thaliana
ttcccaataccgtccta

SEQ ID NO: 161824 - DNA, 17 bp, Arabidopsis thaliana
ttcccaatcactgaatc

SEQ ID NO: 161825 - DNA, 17 bp, Arabidopsis thaliana
ttcccacataactacaa

SEQ ID NO: 161826 - DNA, 17 bp, Arabidopsis thaliana
ttcccaccaagaatgca

SEQ ID NO: 161827 - DNA, 17 bp, Arabidopsis thaliana
ttcccacccacccaccc

SEQ ID NO: 161828 - DNA, 17 bp, Arabidopsis thaliana
ttcccacctatgtggcc

SEQ ID NO: 161829 - DNA, 17 bp, Arabidopsis thaliana
ttcccacgacctcttga

SEQ ID NO: 161830 - DNA, 17 bp, Arabidopsis thaliana
ttcccactgtccctgtc

SEQ ID NO: 161831 - DNA, 17 bp, Arabidopsis thaliana
ttcccagactgaaatac

SEQ ID NO: 161832 - DNA, 17 bp, Arabidopsis thaliana
ttcccagctggaccacc

SEQ ID NO: 161833 - DNA, 17 bp, Arabidopsis thaliana
ttcccagcttcttgtct

SEQ ID NO: 161834 - DNA, 17 bp, Arabidopsis thaliana
ttcccagcttcttgtgg

SEQ ID NO: 161835 - DNA, 17 bp, Arabidopsis thaliana
ttcccagtcacagctgt

SEQ ID NO: 161836 - DNA, 17 bp, Arabidopsis thaliana
ttcccagtggtgtgcct

SEQ ID NO: 161837 - DNA, 17 bp, Arabidopsis thaliana
ttcccataggaacacag

SEQ ID NO: 161838 - DNA, 17 bp, Arabidopsis thaliana
ttcccatcagattgtgc

SEQ ID NO: 161839 - DNA, 17 bp, Arabidopsis thaliana
ttcccatggggaaatag

SEQ ID NO: 161840 - DNA, 17 bp, Arabidopsis thaliana
ttcccattgatcttaag

SEQ ID NO: 161841 - DNA, 17 bp, Arabidopsis thaliana
ttcccattgggcctaag

SEQ ID NO: 161842 - DNA, 17 bp, Arabidopsis thaliana
ttccccaaaggctgtga

SEQ ID NO: 161843 - DNA, 17 bp, Arabidopsis thaliana
ttccccaattggccgag

SEQ ID NO: 161844 - DNA, 17 bp, Arabidopsis thaliana
ttccccacagacggctc

SEQ ID NO: 161845 - DNA, 17 bp, Arabidopsis thaliana
ttccccacccacccacc

SEQ ID NO: 161846 - DNA, 17 bp, Arabidopsis thaliana
ttccccacgtgtgcgcc

SEQ ID NO: 161847 - DNA, 17 bp, Arabidopsis thaliana
ttccccactgaagttcg

SEQ ID NO: 161848 - DNA, 17 bp, Arabidopsis thaliana
ttccccagctttcttga

SEQ ID NO: 161849 - DNA, 17 bp, Arabidopsis thaliana
ttccccattggcactcg

SEQ ID NO: 161850 - DNA, 17 bp, Arabidopsis thaliana
ttccccattttcatttc

SEQ ID NO: 161851 - DNA, 17 bp, Arabidopsis thaliana
ttcccccacactttttg

SEQ ID NO: 161852 - DNA, 17 bp, Arabidopsis thaliana
ttccccccccccccccc

SEQ ID NO: 161853 - DNA, 17 bp, Arabidopsis thaliana
ttccccccctctctagc

SEQ ID NO: 161854 - DNA, 17 bp, Arabidopsis thaliana
ttccccccgaagtttcc

SEQ ID NO: 161855 - DNA, 17 bp, Arabidopsis thaliana
ttcccccctctctctag

SEQ ID NO: 161856 - DNA, 17 bp, Arabidopsis thaliana
ttcccccgcatctccac

SEQ ID NO: 161857 - DNA, 17 bp, Arabidopsis thaliana
ttccccctctctctagc

SEQ ID NO: 161858 - DNA, 17 bp, Arabidopsis thaliana
ttccccctctctctatc

SEQ ID NO: 161859 - DNA, 17 bp, Arabidopsis thaliana
ttcccccttggatgagg

SEQ ID NO: 161860 - DNA, 17 bp, Arabidopsis thaliana
ttccccctttggatgag

SEQ ID NO: 161861 - DNA, 17 bp, Arabidopsis thaliana
ttccccgaaggtcaccc

SEQ ID NO: 161862 - DNA, 17 bp, Arabidopsis thaliana
ttccccgacgcttattt

SEQ ID NO: 161863 - DNA, 17 bp, Arabidopsis thaliana
ttccccgagaccctcca

SEQ ID NO: 161864 - DNA, 17 bp, Arabidopsis thaliana
ttccccgattttccttt

SEQ ID NO: 161865 - DNA, 17 bp, Arabidopsis thaliana
ttccccgccgagtgcct

SEQ ID NO: 161866 - DNA, 17 bp, Arabidopsis thaliana
ttccccggctagactta

SEQ ID NO: 161867 - DNA, 17 bp, Arabidopsis thaliana
ttccccgggcgtcaacc

SEQ ID NO: 161868 - DNA, 17 bp, Arabidopsis thaliana
ttccccgggcgtcgaac

SEQ ID NO: 161869 - DNA, 17 bp, Arabidopsis thaliana
ttccccgtagaatcatg

SEQ ID NO: 161870 - DNA, 17 bp, Arabidopsis thaliana
ttccccgtgagccatct

SEQ ID NO: 161871 - DNA, 17 bp, Arabidopsis thaliana
ttcccctagatgttgaa

SEQ ID NO: 161872 - DNA, 17 bp, Arabidopsis thaliana
ttcccctgggcagcacc

SEQ ID NO: 161873 - DNA, 17 bp, Arabidopsis thaliana
ttcccctggtgtgagaa

SEQ ID NO: 161874 - DNA, 17 bp, Arabidopsis thaliana
ttccccttggcaccaac

SEQ ID NO: 161875 - DNA, 17 bp, Arabidopsis thaliana
ttcccgaagaagacaac

SEQ ID NO: 161876 - DNA, 17 bp, Arabidopsis thaliana
ttcccgaagccggcggc

SEQ ID NO: 161877 - DNA, 17 bp, Arabidopsis thaliana
ttcccgaattaggcttt

SEQ ID NO: 161878 - DNA, 17 bp, Arabidopsis thaliana
ttcccgccaaaaacgca

SEQ ID NO: 161879 - DNA, 17 bp, Arabidopsis thaliana
ttcccgccaaaagtttt

SEQ ID NO: 161880 - DNA, 17 bp, Arabidopsis thaliana
ttcccgccaattttgtt

SEQ ID NO: 161881 - DNA, 17 bp, Arabidopsis thaliana
ttcccgccgtttcgcac

SEQ ID NO: 161882 - DNA, 17 bp, Arabidopsis thaliana
ttcccgcctgtcacgcg

SEQ ID NO: 161883 - DNA, 17 bp, Arabidopsis thaliana
ttcccgctatataccgc

SEQ ID NO: 161884 - DNA, 17 bp, Arabidopsis thaliana
ttcccgcttacagcagt

SEQ ID NO: 161885 - DNA, 17 bp, Arabidopsis thaliana
ttcccggaaggtgaccc

SEQ ID NO: 161886 - DNA, 17 bp, Arabidopsis thaliana
ttcccggagaaagatac

SEQ ID NO: 161887 - DNA, 17 bp, Arabidopsis thaliana
ttcccggatggtgcaca

SEQ ID NO: 161888 - DNA, 17 bp, Arabidopsis thaliana
ttcccggcgagacgtag

SEQ ID NO: 161889 - DNA, 17 bp, Arabidopsis thaliana
ttcccggctggtgcacc

SEQ ID NO: 161890 - DNA, 17 bp, Arabidopsis thaliana
ttcccgggaggtcaccc

SEQ ID NO: 161891 - DNA, 17 bp, Arabidopsis thaliana
ttcccggtccacaactt

SEQ ID NO: 161892 - DNA, 17 bp, Arabidopsis thaliana
ttcccgtaggattaact

SEQ ID NO: 161893 - DNA, 17 bp, Arabidopsis thaliana
ttcccgtctgctatgat

SEQ ID NO: 161894 - DNA, 17 bp, Arabidopsis thaliana
ttcccgtgacgattttt

SEQ ID NO: 161895 - DNA, 17 bp, Arabidopsis thaliana
ttcccgtggatcctcag

SEQ ID NO: 161896 - DNA, 17 bp, Arabidopsis thaliana
ttcccgttgttgagatg

SEQ ID NO: 161897 - DNA, 17 bp, Arabidopsis thaliana
ttccctaacgttggatt

SEQ ID NO: 161898 - DNA, 17 bp, Arabidopsis thaliana
ttccctaccctcagtag

SEQ ID NO: 161899 - DNA, 17 bp, Arabidopsis thaliana
ttccctactgtgtattg

SEQ ID NO: 161900 - DNA, 17 bp, Arabidopsis thaliana
ttccctagaggtcccat

SEQ ID NO: 161901 - DNA, 17 bp, Arabidopsis thaliana
ttccctagcaaaaactt

SEQ ID NO: 161902 - DNA, 17 bp, Arabidopsis thaliana
ttccctagtacgagagg

SEQ ID NO: 161903 - DNA, 17 bp, Arabidopsis thaliana
ttccctatctcggtgaa

SEQ ID NO: 161904 - DNA, 17 bp, Arabidopsis thaliana
ttccctattccggtgat

SEQ ID NO: 161905 - DNA, 17 bp, Arabidopsis thaliana
ttccctattgggtgtgc

SEQ ID NO: 161906 - DNA, 17 bp, Arabidopsis thaliana
ttccctcacgatagctg

SEQ ID NO: 161907 - DNA, 17 bp, Arabidopsis thaliana
ttccctcaggatagccg

SEQ ID NO: 161908 - DNA, 17 bp, Arabidopsis thaliana
ttccctcaggatagctg

SEQ ID NO: 161909 - DNA, 17 bp, Arabidopsis thaliana
ttccctccctccctccc

SEQ ID NO: 161910 - DNA, 17 bp, Arabidopsis thaliana
ttccctccgaagtttcc

SEQ ID NO: 161911 - DNA, 17 bp, Arabidopsis thaliana
ttccctccgggggggta

SEQ ID NO: 161912 - DNA, 17 bp, Arabidopsis thaliana
ttccctccttgggcctg

SEQ ID NO: 161913 - DNA, 17 bp, Arabidopsis thaliana
ttccctcgcaaattgcg

SEQ ID NO: 161914 - DNA, 17 bp, Arabidopsis thaliana
ttccctcgtaaagccat

SEQ ID NO: 161915 - DNA, 17 bp, Arabidopsis thaliana
ttccctcgttccacttg

SEQ ID NO: 161916 - DNA, 17 bp, Arabidopsis thaliana
ttccctctcgatcggtt

SEQ ID NO: 161917 - DNA, 17 bp, Arabidopsis thaliana
ttccctctctgccgatt

SEQ ID NO: 161918 - DNA, 17 bp, Arabidopsis thaliana
ttccctctgctcagctt

SEQ ID NO: 161919 - DNA, 17 bp, Arabidopsis thaliana
ttccctcttacagcagt

SEQ ID NO: 161920 - DNA, 17 bp, Arabidopsis thaliana
ttccctcttggcaccaa

SEQ ID NO: 161921 - DNA, 17 bp, Arabidopsis thaliana
ttccctgaaaagtgcct

SEQ ID NO: 161922 - DNA, 17 bp, Arabidopsis thaliana
ttccctgacttattccc

SEQ ID NO: 161923 - DNA, 17 bp, Arabidopsis thaliana
ttccctgagtattggat

SEQ ID NO: 161924 - DNA, 17 bp, Arabidopsis thaliana
ttccctgccgttggatc

SEQ ID NO: 161925 - DNA, 17 bp, Arabidopsis thaliana
ttccctgcctatctaca

SEQ ID NO: 161926 - DNA, 17 bp, Arabidopsis thaliana
ttccctggagggttgct

SEQ ID NO: 161927 - DNA, 17 bp, Arabidopsis thaliana
ttccctggatgttgaat

SEQ ID NO: 161928 - DNA, 17 bp, Arabidopsis thaliana
ttccctgggattggctt

SEQ ID NO: 161929 - DNA, 17 bp, Arabidopsis thaliana
ttccctgtgaccatggc

SEQ ID NO: 161930 - DNA, 17 bp, Arabidopsis thaliana
ttcccttagttgctgca

SEQ ID NO: 161931 - DNA, 17 bp, Arabidopsis thaliana
ttcccttcagatctgca

SEQ ID NO: 161932 - DNA, 17 bp, Arabidopsis thaliana
ttcccttctaccaagtc

SEQ ID NO: 161933 - DNA, 17 bp, Arabidopsis thaliana
ttcccttgagagacacg

SEQ ID NO: 161934 - DNA, 17 bp, Arabidopsis thaliana
ttcccttgggacatcta

SEQ ID NO: 161935 - DNA, 17 bp, Arabidopsis thaliana
ttcccttgtcaagtttt

SEQ ID NO: 161936 - DNA, 17 bp, Arabidopsis thaliana
ttccctttgatccttgc

SEQ ID NO: 161937 - DNA, 17 bp, Arabidopsis thaliana
ttccctttgcctgagat

SEQ ID NO: 161938 - DNA, 17 bp, Arabidopsis thaliana
ttccctttggggttaac

SEQ ID NO: 161939 - DNA, 17 bp, Arabidopsis thaliana
ttccctttgtcgagaca

SEQ ID NO: 161940 - DNA, 17 bp, Arabidopsis thaliana
ttcccttttgcagaacg

SEQ ID NO: 161941 - DNA, 17 bp, Arabidopsis thaliana
ttccgaaaaggtatcac

SEQ ID NO: 161942 - DNA, 17 bp, Arabidopsis thaliana
ttccgaaataagatccg

SEQ ID NO: 161943 - DNA, 17 bp, Arabidopsis thaliana
ttccgaacccgtccccc

SEQ ID NO: 161944 - DNA, 17 bp, Arabidopsis thaliana
ttccgaacccgtcggct

SEQ ID NO: 161945 - DNA, 17 bp, Arabidopsis thaliana
ttccgaacgatttgttc

SEQ ID NO: 161946 - DNA, 17 bp, Arabidopsis thaliana
ttccgaactcgttccac

SEQ ID NO: 161947 - DNA, 17 bp, Arabidopsis thaliana
ttccgaactttgtccga

SEQ ID NO: 161948 - DNA, 17 bp, Arabidopsis thaliana
ttccgaaggaccaccac

SEQ ID NO: 161949 - DNA, 17 bp, Arabidopsis thaliana
ttccgaagtaacaccac

SEQ ID NO: 161950 - DNA, 17 bp, Arabidopsis thaliana
ttccgaatcagtatttg

SEQ ID NO: 161951 - DNA, 17 bp, Arabidopsis thaliana
ttccgacaagatactgt

SEQ ID NO: 161952 - DNA, 17 bp, Arabidopsis thaliana
ttccgacaatcactttc

SEQ ID NO: 161953 - DNA, 17 bp, Arabidopsis thaliana
ttccgacaggccgaaac

SEQ ID NO: 161954 - DNA, 17 bp, Arabidopsis thaliana
ttccgacaggccgaaat

SEQ ID NO: 161955 - DNA, 17 bp, Arabidopsis thaliana
ttccgacaggtactata

SEQ ID NO: 161956 - DNA, 17 bp, Arabidopsis thaliana
ttccgacatccacaatt

SEQ ID NO: 161957 - DNA, 17 bp, Arabidopsis thaliana
ttccgaccaggcttcat

SEQ ID NO: 161958 - DNA, 17 bp, Arabidopsis thaliana
ttccgaccctcactagg

SEQ ID NO: 161959 - DNA, 17 bp, Arabidopsis thaliana
ttccgacccttattaga

SEQ ID NO: 161960 - DNA, 17 bp, Arabidopsis thaliana
ttccgaccgcatgctgt

SEQ ID NO: 161961 - DNA, 17 bp, Arabidopsis thaliana
ttccgacctttattaga

SEQ ID NO: 161962 - DNA, 17 bp, Arabidopsis thaliana
ttccgacgagccaggtt

SEQ ID NO: 161963 - DNA, 17 bp, Arabidopsis thaliana
ttccgacgattcataaa

SEQ ID NO: 161964 - DNA, 17 bp, Arabidopsis thaliana
ttccgacgcaaattttg

SEQ ID NO: 161965 - DNA, 17 bp, Arabidopsis thaliana
ttccgacgccggtgaag

SEQ ID NO: 161966 - DNA, 17 bp, Arabidopsis thaliana
ttccgacgcggattacg

SEQ ID NO: 161967 - DNA, 17 bp, Arabidopsis thaliana
ttccgacgggttaccga

SEQ ID NO: 161968 - DNA, 17 bp, Arabidopsis thaliana
ttccgacgtgtgggacc

SEQ ID NO: 161969 - DNA, 17 bp, Arabidopsis thaliana
ttccgactaatgccaga

SEQ ID NO: 161970 - DNA, 17 bp, Arabidopsis thaliana
ttccgactaatgccagg

SEQ ID NO: 161971 - DNA, 17 bp, Arabidopsis thaliana
ttccgactaatgtacaa

SEQ ID NO: 161972 - DNA, 17 bp, Arabidopsis thaliana
ttccgactaatgtacac

SEQ ID NO: 161973 - DNA, 17 bp, Arabidopsis thaliana
ttccgactaatgtcagg

SEQ ID NO: 161974 - DNA, 17 bp, Arabidopsis thaliana
ttccgactactaatctg

SEQ ID NO: 161975 - DNA, 17 bp, Arabidopsis thaliana
ttccgactgttcagatc

SEQ ID NO: 161976 - DNA, 17 bp, Arabidopsis thaliana
ttccgacttgtactttc

SEQ ID NO: 161977 - DNA, 17 bp, Arabidopsis thaliana
ttccgagaatattagtg

SEQ ID NO: 161978 - DNA, 17 bp, Arabidopsis thaliana
ttccgagactacccgtg

SEQ ID NO: 161979 - DNA, 17 bp, Arabidopsis thaliana
ttccgagactacttgtg

SEQ ID NO: 161980 - DNA, 17 bp, Arabidopsis thaliana
ttccgagagcacgtctg

SEQ ID NO: 161981 - DNA, 17 bp, Arabidopsis thaliana
ttccgagggcacgtctg

SEQ ID NO: 161982 - DNA, 17 bp, Arabidopsis thaliana
ttccgagtctacttgtg

SEQ ID NO: 161983 - DNA, 17 bp, Arabidopsis thaliana
ttccgagttcggtttct

SEQ ID NO: 161984 - DNA, 17 bp, Arabidopsis thaliana
ttccgagttttctttgc

SEQ ID NO: 161985 - DNA, 17 bp, Arabidopsis thaliana
ttccgataaagctaaca

SEQ ID NO: 161986 - DNA, 17 bp, Arabidopsis thaliana
ttccgataactttccga

SEQ ID NO: 161987 - DNA, 17 bp, Arabidopsis thaliana
ttccgatagatctgctt

SEQ ID NO: 161988 - DNA, 17 bp, Arabidopsis thaliana
ttccgatcggcacgaga

SEQ ID NO: 161989 - DNA, 17 bp, Arabidopsis thaliana
ttccgatctcgagttca

SEQ ID NO: 161990 - DNA, 17 bp, Arabidopsis thaliana
ttccgatggagatggtc

SEQ ID NO: 161991 - DNA, 17 bp, Arabidopsis thaliana
ttccgatgtgcaggtcg

SEQ ID NO: 161992 - DNA, 17 bp, Arabidopsis thaliana
ttccgatgtgggacatt

SEQ ID NO: 161993 - DNA, 17 bp, Arabidopsis thaliana
ttccgatgtgggacctt

SEQ ID NO: 161994 - DNA, 17 bp, Arabidopsis thaliana
ttccgatgtgggacttt

SEQ ID NO: 161995 - DNA, 17 bp, Arabidopsis thaliana
ttccgatgtttgacttt

SEQ ID NO: 161996 - DNA, 17 bp, Arabidopsis thaliana
ttccgattccagcggcg

SEQ ID NO: 161997 - DNA, 17 bp, Arabidopsis thaliana
ttccgattgatattggg

SEQ ID NO: 161998 - DNA, 17 bp, Arabidopsis thaliana
ttccgattgcgtgcttt

SEQ ID NO: 161999 - DNA, 17 bp, Arabidopsis thaliana
ttccgatttccatggcc

SEQ ID NO: 162000 - DNA, 17 bp, Arabidopsis thaliana
ttccgatttcccttttt

SEQ ID NO: 162001 - DNA, 17 bp, Arabidopsis thaliana
ttccgcaacttggagac

SEQ ID NO: 162002 - DNA, 17 bp, Arabidopsis thaliana
ttccgcaagattgattc

SEQ ID NO: 162003 - DNA, 17 bp, Arabidopsis thaliana
ttccgcaatgggcgaaa

SEQ ID NO: 162004 - DNA, 17 bp, Arabidopsis thaliana
ttccgcagacactgtgt

SEQ ID NO: 162005 - DNA, 17 bp, Arabidopsis thaliana
ttccgcagacattgtgt

SEQ ID NO: 162006 - DNA, 17 bp, Arabidopsis thaliana
ttccgcagaccttgtgt

SEQ ID NO: 162007 - DNA, 17 bp, Arabidopsis thaliana
ttccgcagactttgtgt

SEQ ID NO: 162008 - DNA, 17 bp, Arabidopsis thaliana
ttccgcagctttcttga

SEQ ID NO: 162009 - DNA, 17 bp, Arabidopsis thaliana
ttccgcagggagagcgt

SEQ ID NO: 162010 - DNA, 17 bp, Arabidopsis thaliana
ttccgcagttaagcgtg

SEQ ID NO: 162011 - DNA, 17 bp, Arabidopsis thaliana
ttccgccactagagctg

SEQ ID NO: 162012 - DNA, 17 bp, Arabidopsis thaliana
ttccgccagcttatgct

SEQ ID NO: 162013 - DNA, 17 bp, Arabidopsis thaliana
ttccgccgccagttgca

SEQ ID NO: 162014 - DNA, 17 bp, Arabidopsis thaliana
ttccgcctctcggagaa

SEQ ID NO: 162015 - DNA, 17 bp, Arabidopsis thaliana
ttccgcgctaacgatat

SEQ ID NO: 162016 - DNA, 17 bp, Arabidopsis thaliana
ttccgcgggagtggatt

SEQ ID NO: 162017 - DNA, 17 bp, Arabidopsis thaliana
ttccgcggtgacttaat

SEQ ID NO: 162018 - DNA, 17 bp, Arabidopsis thaliana
ttccgctacgggaattt

SEQ ID NO: 162019 - DNA, 17 bp, Arabidopsis thaliana
ttccgctagatctgctt

SEQ ID NO: 162020 - DNA, 17 bp, Arabidopsis thaliana
ttccgctatgtattttt

SEQ ID NO: 162021 - DNA, 17 bp, Arabidopsis thaliana
ttccgctcgggacaggt

SEQ ID NO: 162022 - DNA, 17 bp, Arabidopsis thaliana
ttccgctgctccggtct

SEQ ID NO: 162023 - DNA, 17 bp, Arabidopsis thaliana
ttccgctggattttgtg

SEQ ID NO: 162024 - DNA, 17 bp, Arabidopsis thaliana
ttccgctgtgtaataag

SEQ ID NO: 162025 - DNA, 17 bp, Arabidopsis thaliana
ttccgcttaagccgagt

SEQ ID NO: 162026 - DNA, 17 bp, Arabidopsis thaliana
ttccgcttcatcagatg

SEQ ID NO: 162027 - DNA, 17 bp, Arabidopsis thaliana
ttccgcttcgagtagtt

SEQ ID NO: 162028 - DNA, 17 bp, Arabidopsis thaliana
ttccgcttgatatgctt

SEQ ID NO: 162029 - DNA, 17 bp, Arabidopsis thaliana
ttccggaaccgggacgt

SEQ ID NO: 162030 - DNA, 17 bp, Arabidopsis thaliana
ttccggaatcccagcgg

SEQ ID NO: 162031 - DNA, 17 bp, Arabidopsis thaliana
ttccggaattagatggt

SEQ ID NO: 162032 - DNA, 17 bp, Arabidopsis thaliana
ttccggacatctcccat

SEQ ID NO: 162033 - DNA, 17 bp, Arabidopsis thaliana
ttccggacccgagttgg

SEQ ID NO: 162034 - DNA, 17 bp, Arabidopsis thaliana
ttccggacttgaaatcg

SEQ ID NO: 162035 - DNA, 17 bp, Arabidopsis thaliana
ttccggagaattagggt

SEQ ID NO: 162036 - DNA, 17 bp, Arabidopsis thaliana
ttccggagagggagcct

SEQ ID NO: 162037 - DNA, 17 bp, Arabidopsis thaliana
ttccggaggcacccaag

SEQ ID NO: 162038 - DNA, 17 bp, Arabidopsis thaliana
ttccggagggcggaatg

SEQ ID NO: 162039 - DNA, 17 bp, Arabidopsis thaliana
ttccggagttggcgatt

SEQ ID NO: 162040 - DNA, 17 bp, Arabidopsis thaliana
ttccggatctagcagct

SEQ ID NO: 162041 - DNA, 17 bp, Arabidopsis thaliana
ttccggattcgatccgg

SEQ ID NO: 162042 - DNA, 17 bp, Arabidopsis thaliana
ttccggcagcagcagag

SEQ ID NO: 162043 - DNA, 17 bp, Arabidopsis thaliana
ttccggcaggtcggacc

SEQ ID NO: 162044 - DNA, 17 bp, Arabidopsis thaliana
ttccggcgaagaagttc

SEQ ID NO: 162045 - DNA, 17 bp, Arabidopsis thaliana
ttccggcgattgaatgg

SEQ ID NO: 162046 - DNA, 17 bp, Arabidopsis thaliana
ttccggctatctattga

SEQ ID NO: 162047 - DNA, 17 bp, Arabidopsis thaliana
ttccggctattgtttgc

SEQ ID NO: 162048 - DNA, 17 bp, Arabidopsis thaliana
ttccggcttatgacttt

SEQ ID NO: 162049 - DNA, 17 bp, Arabidopsis thaliana
ttccggcttgtcccttc

SEQ ID NO: 162050 - DNA, 17 bp, Arabidopsis thaliana
ttccgggctcgtcagcc

SEQ ID NO: 162051 - DNA, 17 bp, Arabidopsis thaliana
ttccggggcctgtgttt

SEQ ID NO: 162052 - DNA, 17 bp, Arabidopsis thaliana
ttccggggggagtatgg

SEQ ID NO: 162053 - DNA, 17 bp, Arabidopsis thaliana
ttccggggtgtgaagtg

SEQ ID NO: 162054 - DNA, 17 bp, Arabidopsis thaliana
ttccgggtattatgccg

SEQ ID NO: 162055 - DNA, 17 bp, Arabidopsis thaliana
ttccgggtttatcgtag

SEQ ID NO: 162056 - DNA, 17 bp, Arabidopsis thaliana
ttccggtaagctgcttg

SEQ ID NO: 162057 - DNA, 17 bp, Arabidopsis thaliana
ttccggtgaccggattt

SEQ ID NO: 162058 - DNA, 17 bp, Arabidopsis thaliana
ttccggtgatgatcaat

SEQ ID NO: 162059 - DNA, 17 bp, Arabidopsis thaliana
ttccggtgcagaatatc

SEQ ID NO: 162060 - DNA, 17 bp, Arabidopsis thaliana
ttccggtgcagtggact

SEQ ID NO: 162061 - DNA, 17 bp, Arabidopsis thaliana
ttccggttacatcatgt

SEQ ID NO: 162062 - DNA, 17 bp, Arabidopsis thaliana
ttccggttccgagttgg

SEQ ID NO: 162063 - DNA, 17 bp, Arabidopsis thaliana
ttccggtttgcgagaca

SEQ ID NO: 162064 - DNA, 17 bp, Arabidopsis thaliana
ttccggtttggttcttg

SEQ ID NO: 162065 - DNA, 17 bp, Arabidopsis thaliana
ttccgtaatcgcaaaga

SEQ ID NO: 162066 - DNA, 17 bp, Arabidopsis thaliana
ttccgtacgaaagtgga

SEQ ID NO: 162067 - DNA, 17 bp, Arabidopsis thaliana
ttccgtactacggctga

SEQ ID NO: 162068 - DNA, 17 bp, Arabidopsis thaliana
ttccgtagttacagaga

SEQ ID NO: 162069 - DNA, 17 bp, Arabidopsis thaliana
ttccgtagttacagagg

SEQ ID NO: 162070 - DNA, 17 bp, Arabidopsis thaliana
ttccgtatactcgacca

SEQ ID NO: 162071 - DNA, 17 bp, Arabidopsis thaliana
ttccgtatcagctccag

SEQ ID NO: 162072 - DNA, 17 bp, Arabidopsis thaliana
ttccgtcaagtctttaa

SEQ ID NO: 162073 - DNA, 17 bp, Arabidopsis thaliana
ttccgtcaataagtttt

SEQ ID NO: 162074 - DNA, 17 bp, Arabidopsis thaliana
ttccgtcacttgatgat

SEQ ID NO: 162075 - DNA, 17 bp, Arabidopsis thaliana
ttccgtcagaagcagaa

SEQ ID NO: 162076 - DNA, 17 bp, Arabidopsis thaliana
ttccgtcagacgatcgg

SEQ ID NO: 162077 - DNA, 17 bp, Arabidopsis thaliana
ttccgtccaaggctaaa

SEQ ID NO: 162078 - DNA, 17 bp, Arabidopsis thaliana
ttccgtccaaggctaca

SEQ ID NO: 162079 - DNA, 17 bp, Arabidopsis thaliana
ttccgtctccggcgatt

SEQ ID NO: 162080 - DNA, 17 bp, Arabidopsis thaliana
ttccgtctctaggtggc

SEQ ID NO: 162081 - DNA, 17 bp, Arabidopsis thaliana
ttccgtctgcctgggtg

SEQ ID NO: 162082 - DNA, 17 bp, Arabidopsis thaliana
ttccgtctggcctgact

SEQ ID NO: 162083 - DNA, 17 bp, Arabidopsis thaliana
ttccgtgacatgacgca

SEQ ID NO: 162084 - DNA, 17 bp, Arabidopsis thaliana
ttccgtgccaaattatt

SEQ ID NO: 162085 - DNA, 17 bp, Arabidopsis thaliana
ttccgtgtccggttttt

SEQ ID NO: 162086 - DNA, 17 bp, Arabidopsis thaliana
ttccgttaacgaacgag

SEQ ID NO: 162087 - DNA, 17 bp, Arabidopsis thaliana
ttccgttaacggggtta

SEQ ID NO: 162088 - DNA, 17 bp, Arabidopsis thaliana
ttccgttaggttttttg

SEQ ID NO: 162089 - DNA, 17 bp, Arabidopsis thaliana
ttccgttcgttcaattg

SEQ ID NO: 162090 - DNA, 17 bp, Arabidopsis thaliana
ttccgttctgtattttc

SEQ ID NO: 162091 - DNA, 17 bp, Arabidopsis thaliana
ttccgttgaggcttagt

SEQ ID NO: 162092 - DNA, 17 bp, Arabidopsis thaliana
ttccgttggcgtatgta

SEQ ID NO: 162093 - DNA, 17 bp, Arabidopsis thaliana
ttccgttggtgtgcgcc

SEQ ID NO: 162094 - DNA, 17 bp, Arabidopsis thaliana
ttccgttgttagatagt

SEQ ID NO: 162095 - DNA, 17 bp, Arabidopsis thaliana
ttccgttgttagattgt

SEQ ID NO: 162096 - DNA, 17 bp, Arabidopsis thaliana
ttccgttgttgcttgtt

SEQ ID NO: 162097 - DNA, 17 bp, Arabidopsis thaliana
ttccgtttgcggttgcg

SEQ ID NO: 162098 - DNA, 17 bp, Arabidopsis thaliana
ttcctaaaacgccatgt

SEQ ID NO: 162099 - DNA, 17 bp, Arabidopsis thaliana
ttcctaaacttccgatg

SEQ ID NO: 162100 - DNA, 17 bp, Arabidopsis thaliana
ttcctaacaagccagtt

SEQ ID NO: 162101 - DNA, 17 bp, Arabidopsis thaliana
ttcctaaggatggggta

SEQ ID NO: 162102 - DNA, 17 bp, Arabidopsis thaliana
ttcctaaggttttggta

SEQ ID NO: 162103 - DNA, 17 bp, Arabidopsis thaliana
ttcctaatagccctaat

SEQ ID NO: 162104 - DNA, 17 bp, Arabidopsis thaliana
ttcctaatcttcaaatt

SEQ ID NO: 162105 - DNA, 17 bp, Arabidopsis thaliana
ttcctaatttgtgaaac

SEQ ID NO: 162106 - DNA, 17 bp, Arabidopsis thaliana
ttcctaccagtggatct

SEQ ID NO: 162107 - DNA, 17 bp, Arabidopsis thaliana
ttcctaccgaggtcggc

SEQ ID NO: 162108 - DNA, 17 bp, Arabidopsis thaliana
ttcctacgagaactatc

SEQ ID NO: 162109 - DNA, 17 bp, Arabidopsis thaliana
ttcctacgcctttaaga

SEQ ID NO: 162110 - DNA, 17 bp, Arabidopsis thaliana
ttcctacttgtgaagcc

SEQ ID NO: 162111 - DNA, 17 bp, Arabidopsis thaliana
ttcctagaacaccaatc

SEQ ID NO: 162112 - DNA, 17 bp, Arabidopsis thaliana
ttcctagactttctggt

SEQ ID NO: 162113 - DNA, 17 bp, Arabidopsis thaliana
ttcctatcattgtgaag

SEQ ID NO: 162114 - DNA, 17 bp, Arabidopsis thaliana
ttcctatcgagactgac

SEQ ID NO: 162115 - DNA, 17 bp, Arabidopsis thaliana
ttcctatgcggctcgta

SEQ ID NO: 162116 - DNA, 17 bp, Arabidopsis thaliana
ttcctattagctcagtg

SEQ ID NO: 162117 - DNA, 17 bp, Arabidopsis thaliana
ttcctattagctggacc

SEQ ID NO: 162118 - DNA, 17 bp, Arabidopsis thaliana
ttcctcaaactctttgg

SEQ ID NO: 162119 - DNA, 17 bp, Arabidopsis thaliana
ttcctcaagctgtggcc

SEQ ID NO: 162120 - DNA, 17 bp, Arabidopsis thaliana
ttcctcaattgcgtgct

SEQ ID NO: 162121 - DNA, 17 bp, Arabidopsis thaliana
ttcctcagagctgtgcc

SEQ ID NO: 162122 - DNA, 17 bp, Arabidopsis thaliana
ttcctcagatggttttg

SEQ ID NO: 162123 - DNA, 17 bp, Arabidopsis thaliana
ttcctcagccagtttgc

SEQ ID NO: 162124 - DNA, 17 bp, Arabidopsis thaliana
ttcctcaggatctcctg

SEQ ID NO: 162125 - DNA, 17 bp, Arabidopsis thaliana
ttcctcaggattggctc

SEQ ID NO: 162126 - DNA, 17 bp, Arabidopsis thaliana
ttcctcagtccttggca

SEQ ID NO: 162127 - DNA, 17 bp, Arabidopsis thaliana
ttcctcagtcttgcggg

SEQ ID NO: 162128 - DNA, 17 bp, Arabidopsis thaliana
ttcctcagtttacaggt

SEQ ID NO: 162129 - DNA, 17 bp, Arabidopsis thaliana
ttcctcagtttctgcat

SEQ ID NO: 162130 - DNA, 17 bp, Arabidopsis thaliana
ttcctcatcgtcagacc

SEQ ID NO: 162131 - DNA, 17 bp, Arabidopsis thaliana
ttcctcatctccgctcg

SEQ ID NO: 162132 - DNA, 17 bp, Arabidopsis thaliana
ttcctcatcttcatcat

SEQ ID NO: 162133 - DNA, 17 bp, Arabidopsis thaliana
ttcctcatgagggtggg

SEQ ID NO: 162134 - DNA, 17 bp, Arabidopsis thaliana
ttcctcatgggcatgct

SEQ ID NO: 162135 - DNA, 17 bp, Arabidopsis thaliana
ttcctcatttatcagct

SEQ ID NO: 162136 - DNA, 17 bp, Arabidopsis thaliana
ttcctccaacgaagctc

SEQ ID NO: 162137 - DNA, 17 bp, Arabidopsis thaliana
ttcctccatggtttcga

SEQ ID NO: 162138 - DNA, 17 bp, Arabidopsis thaliana
ttcctcccgacgggcgt

SEQ ID NO: 162139 - DNA, 17 bp, Arabidopsis thaliana
ttcctcccggcagacgc

SEQ ID NO: 162140 - DNA, 17 bp, Arabidopsis thaliana
ttcctccgaaagactat

SEQ ID NO: 162141 - DNA, 17 bp, Arabidopsis thaliana
ttcctccgaagtttccc

SEQ ID NO: 162142 - DNA, 17 bp, Arabidopsis thaliana
ttcctccgccatcttat

SEQ ID NO: 162143 - DNA, 17 bp, Arabidopsis thaliana
ttcctcctctctggttt

SEQ ID NO: 162144 - DNA, 17 bp, Arabidopsis thaliana
ttcctcctcttggctcg

SEQ ID NO: 162145 - DNA, 17 bp, Arabidopsis thaliana
ttcctcctcttggcttg

SEQ ID NO: 162146 - DNA, 17 bp, Arabidopsis thaliana
ttcctcctggcagacgc

SEQ ID NO: 162147 - DNA, 17 bp, Arabidopsis thaliana
ttcctccttctgaggcc

SEQ ID NO: 162148 - DNA, 17 bp, Arabidopsis thaliana
ttcctccttgtcagttt

SEQ ID NO: 162149 - DNA, 17 bp, Arabidopsis thaliana
ttcctcgaattgtcact

SEQ ID NO: 162150 - DNA, 17 bp, Arabidopsis thaliana
ttcctcgacgaagcatg

SEQ ID NO: 162151 - DNA, 17 bp, Arabidopsis thaliana
ttcctcgagatccgtgc

SEQ ID NO: 162152 - DNA, 17 bp, Arabidopsis thaliana
ttcctcgagatctgtgc

SEQ ID NO: 162153 - DNA, 17 bp, Arabidopsis thaliana
ttcctcgatgatgtgct

SEQ ID NO: 162154 - DNA, 17 bp, Arabidopsis thaliana
ttcctcgcactctggtg

SEQ ID NO: 162155 - DNA, 17 bp, Arabidopsis thaliana
ttcctcgcgggtgcacc

SEQ ID NO: 162156 - DNA, 17 bp, Arabidopsis thaliana
ttcctcggacccgatag

SEQ ID NO: 162157 - DNA, 17 bp, Arabidopsis thaliana
ttcctcggacccggtcg

SEQ ID NO: 162158 - DNA, 17 bp, Arabidopsis thaliana
ttcctcggatcaaaagt

SEQ ID NO: 162159 - DNA, 17 bp, Arabidopsis thaliana
ttcctcgtcgtcatcat

SEQ ID NO: 162160 - DNA, 17 bp, Arabidopsis thaliana
ttcctcgttgtatcaag

SEQ ID NO: 162161 - DNA, 17 bp, Arabidopsis thaliana
ttcctctactttcagga

SEQ ID NO: 162162 - DNA, 17 bp, Arabidopsis thaliana
ttcctctagccttctgt

SEQ ID NO: 162163 - DNA, 17 bp, Arabidopsis thaliana
ttcctctatcgtctttt

SEQ ID NO: 162164 - DNA, 17 bp, Arabidopsis thaliana
ttcctctccatgttccg

SEQ ID NO: 162165 - DNA, 17 bp, Arabidopsis thaliana
ttcctctcgacggaccg

SEQ ID NO: 162166 - DNA, 17 bp, Arabidopsis thaliana
ttcctctcgatcggttc

SEQ ID NO: 162167 - DNA, 17 bp, Arabidopsis thaliana
ttcctctcgttggatat

SEQ ID NO: 162168 - DNA, 17 bp, Arabidopsis thaliana
ttcctctcttgcttgag

SEQ ID NO: 162169 - DNA, 17 bp, Arabidopsis thaliana
ttcctctgacggtccta

SEQ ID NO: 162170 - DNA, 17 bp, Arabidopsis thaliana
ttcctctgactcaggct

SEQ ID NO: 162171 - DNA, 17 bp, Arabidopsis thaliana
ttcctctggctcggact

SEQ ID NO: 162172 - DNA, 17 bp, Arabidopsis thaliana
ttcctcttcatgctctt

SEQ ID NO: 162173 - DNA, 17 bp, Arabidopsis thaliana
ttcctcttcgctgaact

SEQ ID NO: 162174 - DNA, 17 bp, Arabidopsis thaliana
ttcctcttctacccctc

SEQ ID NO: 162175 - DNA, 17 bp, Arabidopsis thaliana
ttcctcttctacccctg

SEQ ID NO: 162176 - DNA, 17 bp, Arabidopsis thaliana
ttcctgaacccgaattt

SEQ ID NO: 162177 - DNA, 17 bp, Arabidopsis thaliana
ttcctgaacttgggaca

SEQ ID NO: 162178 - DNA, 17 bp, Arabidopsis thaliana
ttcctgaaggtggactg

SEQ ID NO: 162179 - DNA, 17 bp, Arabidopsis thaliana
ttcctgaatctaaaatc

SEQ ID NO: 162180 - DNA, 17 bp, Arabidopsis thaliana
ttcctgaccgtttgatc

SEQ ID NO: 162181 - DNA, 17 bp, Arabidopsis thaliana
ttcctgacgagacttaa

SEQ ID NO: 162182 - DNA, 17 bp, Arabidopsis thaliana
ttcctgactcaacatga

SEQ ID NO: 162183 - DNA, 17 bp, Arabidopsis thaliana
ttcctgactggtcgcat

SEQ ID NO: 162184 - DNA, 17 bp, Arabidopsis thaliana
ttcctgaggtgacttcg

SEQ ID NO: 162185 - DNA, 17 bp, Arabidopsis thaliana
ttcctgcaaacttgcct

SEQ ID NO: 162186 - DNA, 17 bp, Arabidopsis thaliana
ttcctgccaaattcaaa

SEQ ID NO: 162187 - DNA, 17 bp, Arabidopsis thaliana
ttcctgcgactctttca

SEQ ID NO: 162188 - DNA, 17 bp, Arabidopsis thaliana
ttcctgcttcggcggct

SEQ ID NO: 162189 - DNA, 17 bp, Arabidopsis thaliana
ttcctggaaggtcatct

SEQ ID NO: 162190 - DNA, 17 bp, Arabidopsis thaliana
ttcctggaattttgggt

SEQ ID NO: 162191 - DNA, 17 bp, Arabidopsis thaliana
ttcctggatcggttagc

SEQ ID NO: 162192 - DNA, 17 bp, Arabidopsis thaliana
ttcctggcaagcctcgg

SEQ ID NO: 162193 - DNA, 17 bp, Arabidopsis thaliana
ttcctggctccctgtat

SEQ ID NO: 162194 - DNA, 17 bp, Arabidopsis thaliana
ttcctggcttggtgaaa

SEQ ID NO: 162195 - DNA, 17 bp, Arabidopsis thaliana
ttcctggtttggctcac

SEQ ID NO: 162196 - DNA, 17 bp, Arabidopsis thaliana
ttcctgtccagtttgct

SEQ ID NO: 162197 - DNA, 17 bp, Arabidopsis thaliana
ttcctgtgttgagaaag

SEQ ID NO: 162198 - DNA, 17 bp, Arabidopsis thaliana
ttcctgtttcttcacac

SEQ ID NO: 162199 - DNA, 17 bp, Arabidopsis thaliana
ttcctgttttgtaactg

SEQ ID NO: 162200 - DNA, 17 bp, Arabidopsis thaliana
ttccttaacagggtctc

SEQ ID NO: 162201 - DNA, 17 bp, Arabidopsis thaliana
ttccttaaccgggtcaa

SEQ ID NO: 162202 - DNA, 17 bp, Arabidopsis thaliana
ttccttaaggtttcatg

SEQ ID NO: 162203 - DNA, 17 bp, Arabidopsis thaliana
ttccttaccaggtccag

SEQ ID NO: 162204 - DNA, 17 bp, Arabidopsis thaliana
ttccttacctctaggaa

SEQ ID NO: 162205 - DNA, 17 bp, Arabidopsis thaliana
ttccttactgttggcga

SEQ ID NO: 162206 - DNA, 17 bp, Arabidopsis thaliana
ttccttagaatagccga

SEQ ID NO: 162207 - DNA, 17 bp, Arabidopsis thaliana
ttccttagacggacttc

SEQ ID NO: 162208 - DNA, 17 bp, Arabidopsis thaliana
ttccttagccgtctttg

SEQ ID NO: 162209 - DNA, 17 bp, Arabidopsis thaliana
ttccttagtttacaggt

SEQ ID NO: 162210 - DNA, 17 bp, Arabidopsis thaliana
ttccttcacggatctta

SEQ ID NO: 162211 - DNA, 17 bp, Arabidopsis thaliana
ttccttcagagcactgg

SEQ ID NO: 162212 - DNA, 17 bp, Arabidopsis thaliana
ttccttcagccctttgt

SEQ ID NO: 162213 - DNA, 17 bp, Arabidopsis thaliana
ttccttcagctgcgtga

SEQ ID NO: 162214 - DNA, 17 bp, Arabidopsis thaliana
ttccttccaagggttgg

SEQ ID NO: 162215 - DNA, 17 bp, Arabidopsis thaliana
ttccttccacaacttga

SEQ ID NO: 162216 - DNA, 17 bp, Arabidopsis thaliana
ttccttccacagctttc

SEQ ID NO: 162217 - DNA, 17 bp, Arabidopsis thaliana
ttccttccagacatatc

SEQ ID NO: 162218 - DNA, 17 bp, Arabidopsis thaliana
ttccttccccgggcggg

SEQ ID NO: 162219 - DNA, 17 bp, Arabidopsis thaliana
ttccttccgaaaaggta

SEQ ID NO: 162220 - DNA, 17 bp, Arabidopsis thaliana
ttccttccgacctttat

SEQ ID NO: 162221 - DNA, 17 bp, Arabidopsis thaliana
ttccttccgcaagattg

SEQ ID NO: 162222 - DNA, 17 bp, Arabidopsis thaliana
ttccttccggaaccggg

SEQ ID NO: 162223 - DNA, 17 bp, Arabidopsis thaliana
ttccttcctcaggattg

SEQ ID NO: 162224 - DNA, 17 bp, Arabidopsis thaliana
ttccttcctcatgggca

SEQ ID NO: 162225 - DNA, 17 bp, Arabidopsis thaliana
ttccttcctctctgaca

SEQ ID NO: 162226 - DNA, 17 bp, Arabidopsis thaliana
ttccttcctcttgcagg

SEQ ID NO: 162227 - DNA, 17 bp, Arabidopsis thaliana
ttccttccttaacaggg

SEQ ID NO: 162228 - DNA, 17 bp, Arabidopsis thaliana
ttccttccttccctcag

SEQ ID NO: 162229 - DNA, 17 bp, Arabidopsis thaliana
ttccttcgaatcctgct

SEQ ID NO: 162230 - DNA, 17 bp, Arabidopsis thaliana
ttccttcgaggtgtcaa

SEQ ID NO: 162231 - DNA, 17 bp, Arabidopsis thaliana
ttccttcgagtgacact

SEQ ID NO: 162232 - DNA, 17 bp, Arabidopsis thaliana
ttccttcgattcccggc

SEQ ID NO: 162233 - DNA, 17 bp, Arabidopsis thaliana
ttccttcgcaggagaga

SEQ ID NO: 162234 - DNA, 17 bp, Arabidopsis thaliana
ttccttcgccccctacc

SEQ ID NO: 162235 - DNA, 17 bp, Arabidopsis thaliana
ttccttcgcttgcagag

SEQ ID NO: 162236 - DNA, 17 bp, Arabidopsis thaliana
ttccttcggcttcgcga

SEQ ID NO: 162237 - DNA, 17 bp, Arabidopsis thaliana
ttccttcggggcgtgga

SEQ ID NO: 162238 - DNA, 17 bp, Arabidopsis thaliana
ttccttcgttcagctcc

SEQ ID NO: 162239 - DNA, 17 bp, Arabidopsis thaliana
ttccttcgttcctgggc

SEQ ID NO: 162240 - DNA, 17 bp, Arabidopsis thaliana
ttccttcgtttcccggc

SEQ ID NO: 162241 - DNA, 17 bp, Arabidopsis thaliana
ttccttcgtttgcatgt

SEQ ID NO: 162242 - DNA, 17 bp, Arabidopsis thaliana
ttccttcgtttgcttgt

SEQ ID NO: 162243 - DNA, 17 bp, Arabidopsis thaliana
ttccttctaacagcttt

SEQ ID NO: 162244 - DNA, 17 bp, Arabidopsis thaliana
ttccttctaagctccaa

SEQ ID NO: 162245 - DNA, 17 bp, Arabidopsis thaliana
ttccttctatggacttc

SEQ ID NO: 162246 - DNA, 17 bp, Arabidopsis thaliana
ttccttctcctgggcag

SEQ ID NO: 162247 - DNA, 17 bp, Arabidopsis thaliana
ttccttctctgcttgga

SEQ ID NO: 162248 - DNA, 17 bp, Arabidopsis thaliana
ttccttctcttgggtga

SEQ ID NO: 162249 - DNA, 17 bp, Arabidopsis thaliana
ttccttctgatacttga

SEQ ID NO: 162250 - DNA, 17 bp, Arabidopsis thaliana
ttccttctgatcttcag

SEQ ID NO: 162251 - DNA, 17 bp, Arabidopsis thaliana
ttccttctgattttgtg

SEQ ID NO: 162252 - DNA, 17 bp, Arabidopsis thaliana
ttccttctgcggttttt

SEQ ID NO: 162253 - DNA, 17 bp, Arabidopsis thaliana
ttccttctggccatttg

SEQ ID NO: 162254 - DNA, 17 bp, Arabidopsis thaliana
ttccttctgttgcttgt

SEQ ID NO: 162255 - DNA, 17 bp, Arabidopsis thaliana
ttccttcttcgatggcc

SEQ ID NO: 162256 - DNA, 17 bp, Arabidopsis thaliana
ttccttcttctacaagc

SEQ ID NO: 162257 - DNA, 17 bp, Arabidopsis thaliana
ttccttcttctcttgtg

SEQ ID NO: 162258 - DNA, 17 bp, Arabidopsis thaliana
ttccttcttctgcctca

SEQ ID NO: 162259 - DNA, 17 bp, Arabidopsis thaliana
ttccttcttgaccttgt

SEQ ID NO: 162260 - DNA, 17 bp, Arabidopsis thaliana
ttccttcttggacaaaa

SEQ ID NO: 162261 - DNA, 17 bp, Arabidopsis thaliana
ttccttctttaagggtc

SEQ ID NO: 162262 - DNA, 17 bp, Arabidopsis thaliana
ttccttctttaagggtg

SEQ ID NO: 162263 - DNA, 17 bp, Arabidopsis thaliana
ttccttctttccgacct

SEQ ID NO: 162264 - DNA, 17 bp, Arabidopsis thaliana
ttccttctttgacgaga

SEQ ID NO: 162265 - DNA, 17 bp, Arabidopsis thaliana
ttccttcttttgtctcg

SEQ ID NO: 162266 - DNA, 17 bp, Arabidopsis thaliana
ttccttctttttcccgg

SEQ ID NO: 162267 - DNA, 17 bp, Arabidopsis thaliana
ttccttgaaatttgtgc

SEQ ID NO: 162268 - DNA, 17 bp, Arabidopsis thaliana
ttccttgactcgctttc

SEQ ID NO: 162269 - DNA, 17 bp, Arabidopsis thaliana
ttccttgatagccaccg

SEQ ID NO: 162270 - DNA, 17 bp, Arabidopsis thaliana
ttccttgatctcggatg

SEQ ID NO: 162271 - DNA, 17 bp, Arabidopsis thaliana
ttccttgatggtgaaag

SEQ ID NO: 162272 - DNA, 17 bp, Arabidopsis thaliana
ttccttggcgtttggtt

SEQ ID NO: 162273 - DNA, 17 bp, Arabidopsis thaliana
ttccttggtgcaggtcg

SEQ ID NO: 162274 - DNA, 17 bp, Arabidopsis thaliana
ttccttgtagctctgca

SEQ ID NO: 162275 - DNA, 17 bp, Arabidopsis thaliana
ttccttgtagctctgta

SEQ ID NO: 162276 - DNA, 17 bp, Arabidopsis thaliana
ttccttgtcagaagacc

SEQ ID NO: 162277 - DNA, 17 bp, Arabidopsis thaliana
ttccttgtcgctctgaa

SEQ ID NO: 162278 - DNA, 17 bp, Arabidopsis thaliana
ttccttgtcgctttgca

SEQ ID NO: 162279 - DNA, 17 bp, Arabidopsis thaliana
ttccttgtgaccgtgtt

SEQ ID NO: 162280 - DNA, 17 bp, Arabidopsis thaliana
ttccttgtgctcgagtg

SEQ ID NO: 162281 - DNA, 17 bp, Arabidopsis thaliana
ttcctttcaagcgtgat

SEQ ID NO: 162282 - DNA, 17 bp, Arabidopsis thaliana
ttcctttccgctgctcg

SEQ ID NO: 162283 - DNA, 17 bp, Arabidopsis thaliana
ttcctttcgcagttgat

SEQ ID NO: 162284 - DNA, 17 bp, Arabidopsis thaliana
ttcctttcgtggacaga

SEQ ID NO: 162285 - DNA, 17 bp, Arabidopsis thaliana
ttcctttctcaggcgtt

SEQ ID NO: 162286 - DNA, 17 bp, Arabidopsis thaliana
ttcctttgacaatttct

SEQ ID NO: 162287 - DNA, 17 bp, Arabidopsis thaliana
ttcctttgacattggcg

SEQ ID NO: 162288 - DNA, 17 bp, Arabidopsis thaliana
ttcctttgccggatctg

SEQ ID NO: 162289 - DNA, 17 bp, Arabidopsis thaliana
ttcctttggaggaactg

SEQ ID NO: 162290 - DNA, 17 bp, Arabidopsis thaliana
ttcctttgtcgctaaga

SEQ ID NO: 162291 - DNA, 17 bp, Arabidopsis thaliana
ttcctttgtgccggtta

SEQ ID NO: 162292 - DNA, 17 bp, Arabidopsis thaliana
ttcctttgtgctgcttc

SEQ ID NO: 162293 - DNA, 17 bp, Arabidopsis thaliana
ttccttttccttagctt

SEQ ID NO: 162294 - DNA, 17 bp, Arabidopsis thaliana
ttcctttttctctcgaa

SEQ ID NO: 162295 - DNA, 17 bp, Arabidopsis thaliana
ttcgaaaataacaaagt

SEQ ID NO: 162296 - DNA, 17 bp, Arabidopsis thaliana
ttcgaaaatctgaatgc

SEQ ID NO: 162297 - DNA, 17 bp, Arabidopsis thaliana
ttcgaaaccctctctct

SEQ ID NO: 162298 - DNA, 17 bp, Arabidopsis thaliana
ttcgaaacctgcatggg

SEQ ID NO: 162299 - DNA, 17 bp, Arabidopsis thaliana
ttcgaaacctgcatggt

SEQ ID NO: 162300 - DNA, 17 bp, Arabidopsis thaliana
ttcgaaagactatccgg

SEQ ID NO: 162301 - DNA, 17 bp, Arabidopsis thaliana
ttcgaaagttgtgatga

SEQ ID NO: 162302 - DNA, 17 bp, Arabidopsis thaliana
ttcgaaatccgatttcc

SEQ ID NO: 162303 - DNA, 17 bp, Arabidopsis thaliana
ttcgaacacaatcaaga

SEQ ID NO: 162304 - DNA, 17 bp, Arabidopsis thaliana
ttcgaaccaggcttcat

SEQ ID NO: 162305 - DNA, 17 bp, Arabidopsis thaliana
ttcgaaccaggggaatt

SEQ ID NO: 162306 - DNA, 17 bp, Arabidopsis thaliana
ttcgaacccaacacctc

SEQ ID NO: 162307 - DNA, 17 bp, Arabidopsis thaliana
ttcgaaccccacaccct

SEQ ID NO: 162308 - DNA, 17 bp, Arabidopsis thaliana
ttcgaaccccacagcct

SEQ ID NO: 162309 - DNA, 17 bp, Arabidopsis thaliana
ttcgaacccctgttgac

SEQ ID NO: 162310 - DNA, 17 bp, Arabidopsis thaliana
ttcgaacccggccgaag

SEQ ID NO: 162311 - DNA, 17 bp, Arabidopsis thaliana
ttcgaacccgggcgaag

SEQ ID NO: 162312 - DNA, 17 bp, Arabidopsis thaliana
ttcgaacccgggcgacg

SEQ ID NO: 162313 - DNA, 17 bp, Arabidopsis thaliana
ttcgaacccgggcggag

SEQ ID NO: 162314 - DNA, 17 bp, Arabidopsis thaliana
ttcgaacccgggctcag

SEQ ID NO: 162315 - DNA, 17 bp, Arabidopsis thaliana
ttcgaacccgggttcag

SEQ ID NO: 162316 - DNA, 17 bp, Arabidopsis thaliana
ttcgaacccggttgagc

SEQ ID NO: 162317 - DNA, 17 bp, Arabidopsis thaliana
ttcgaacccgtgcgaag

SEQ ID NO: 162318 - DNA, 17 bp, Arabidopsis thaliana
ttcgaaccctatttgag

SEQ ID NO: 162319 - DNA, 17 bp, Arabidopsis thaliana
ttcgaaccctgctgtcg

SEQ ID NO: 162320 - DNA, 17 bp, Arabidopsis thaliana
ttcgaaccctgctgttg

SEQ ID NO: 162321 - DNA, 17 bp, Arabidopsis thaliana
ttcgaacctgagaggat

SEQ ID NO: 162322 - DNA, 17 bp, Arabidopsis thaliana
ttcgaacctgggctcag

SEQ ID NO: 162323 - DNA, 17 bp, Arabidopsis thaliana
ttcgaaccttgggatgg

SEQ ID NO: 162324 - DNA, 17 bp, Arabidopsis thaliana
ttcgaacttatttacaa

SEQ ID NO: 162325 - DNA, 17 bp, Arabidopsis thaliana
ttcgaactttttgggtg

SEQ ID NO: 162326 - DNA, 17 bp, Arabidopsis thaliana
ttcgaagacgacgaccc

SEQ ID NO: 162327 - DNA, 17 bp, Arabidopsis thaliana
ttcgaagatatcaccgg

SEQ ID NO: 162328 - DNA, 17 bp, Arabidopsis thaliana
ttcgaaggtcgtctact

SEQ ID NO: 162329 - DNA, 17 bp, Arabidopsis thaliana
ttcgaatccctctctct

SEQ ID NO: 162330 - DNA, 17 bp, Arabidopsis thaliana
ttcgaatccctctcttt

SEQ ID NO: 162331 - DNA, 17 bp, Arabidopsis thaliana
ttcgaatccctcttttc

SEQ ID NO: 162332 - DNA, 17 bp, Arabidopsis thaliana
ttcgaatccgttgaccg

SEQ ID NO: 162333 - DNA, 17 bp, Arabidopsis thaliana
ttcgaatcctacttgga

SEQ ID NO: 162334 - DNA, 17 bp, Arabidopsis thaliana
ttcgaatcctacttggg

SEQ ID NO: 162335 - DNA, 17 bp, Arabidopsis thaliana
ttcgaatcctgccgccc

SEQ ID NO: 162336 - DNA, 17 bp, Arabidopsis thaliana
ttcgaatcctgccgcct

SEQ ID NO: 162337 - DNA, 17 bp, Arabidopsis thaliana
ttcgaatcctgccgctc

SEQ ID NO: 162338 - DNA, 17 bp, Arabidopsis thaliana
ttcgaatcctgccgttc

SEQ ID NO: 162339 - DNA, 17 bp, Arabidopsis thaliana
ttcgaatcctgctgctg

SEQ ID NO: 162340 - DNA, 17 bp, Arabidopsis thaliana
ttcgaatcctgctgtcc

SEQ ID NO: 162341 - DNA, 17 bp, Arabidopsis thaliana
ttcgaatcctgctgtcg

SEQ ID NO: 162342 - DNA, 17 bp, Arabidopsis thaliana
ttcgaatcctgctgttc

SEQ ID NO: 162343 - DNA, 17 bp, Arabidopsis thaliana
ttcgaatcctgctgttg

SEQ ID NO: 162344 - DNA, 17 bp, Arabidopsis thaliana
ttcgaatcctgcttggg

SEQ ID NO: 162345 - DNA, 17 bp, Arabidopsis thaliana
ttcgaatcctgtcacct

SEQ ID NO: 162346 - DNA, 17 bp, Arabidopsis thaliana
ttcgaatccttccgtcc

SEQ ID NO: 162347 - DNA, 17 bp, Arabidopsis thaliana
ttcgaatccttggggag

SEQ ID NO: 162348 - DNA, 17 bp, Arabidopsis thaliana
ttcgaatcgcagggaca

SEQ ID NO: 162349 - DNA, 17 bp, Arabidopsis thaliana
ttcgaatcgtatcgggc

SEQ ID NO: 162350 - DNA, 17 bp, Arabidopsis thaliana
ttcgaatctatcgcatc

SEQ ID NO: 162351 - DNA, 17 bp, Arabidopsis thaliana
ttcgaatctctcaggcg

SEQ ID NO: 162352 - DNA, 17 bp, Arabidopsis thaliana
ttcgaatctctcaggtg

SEQ ID NO: 162353 - DNA, 17 bp, Arabidopsis thaliana
ttcgaatggtaactgcg

SEQ ID NO: 162354 - DNA, 17 bp, Arabidopsis thaliana
ttcgaattcttcgtcaa

SEQ ID NO: 162355 - DNA, 17 bp, Arabidopsis thaliana
ttcgacaacgcatacta

SEQ ID NO: 162356 - DNA, 17 bp, Arabidopsis thaliana
ttcgacaatcacttctc

SEQ ID NO: 162357 - DNA, 17 bp, Arabidopsis thaliana
ttcgacacgaggaatga

SEQ ID NO: 162358 - DNA, 17 bp, Arabidopsis thaliana
ttcgacacttgactcaa

SEQ ID NO: 162359 - DNA, 17 bp, Arabidopsis thaliana
ttcgacattttgcattg

SEQ ID NO: 162360 - DNA, 17 bp, Arabidopsis thaliana
ttcgaccacccagttgt

SEQ ID NO: 162361 - DNA, 17 bp, Arabidopsis thaliana
ttcgaccatccaagaag

SEQ ID NO: 162362 - DNA, 17 bp, Arabidopsis thaliana
ttcgacccagaatttct

SEQ ID NO: 162363 - DNA, 17 bp, Arabidopsis thaliana
ttcgacccctacctggc

SEQ ID NO: 162364 - DNA, 17 bp, Arabidopsis thaliana
ttcgacccctctctcta

SEQ ID NO: 162365 - DNA, 17 bp, Arabidopsis thaliana
ttcgaccctgggcagca

SEQ ID NO: 162366 - DNA, 17 bp, Arabidopsis thaliana
ttcgaccgttttgacga

SEQ ID NO: 162367 - DNA, 17 bp, Arabidopsis thaliana
ttcgacgaagtccgtat

SEQ ID NO: 162368 - DNA, 17 bp, Arabidopsis thaliana
ttcgacgacagttgatc

SEQ ID NO: 162369 - DNA, 17 bp, Arabidopsis thaliana
ttcgacgacgctttcga

SEQ ID NO: 162370 - DNA, 17 bp, Arabidopsis thaliana
ttcgacgagaaaatcac

SEQ ID NO: 162371 - DNA, 17 bp, Arabidopsis thaliana
ttcgacgaggagtgtgg

SEQ ID NO: 162372 - DNA, 17 bp, Arabidopsis thaliana
ttcgacgctcttagttc

SEQ ID NO: 162373 - DNA, 17 bp, Arabidopsis thaliana
ttcgacggaactgttct

SEQ ID NO: 162374 - DNA, 17 bp, Arabidopsis thaliana
ttcgacgggttggcggg

SEQ ID NO: 162375 - DNA, 17 bp, Arabidopsis thaliana
ttcgacggtgccgagtg

SEQ ID NO: 162376 - DNA, 17 bp, Arabidopsis thaliana
ttcgacggtgtctttga

SEQ ID NO: 162377 - DNA, 17 bp, Arabidopsis thaliana
ttcgacgtgccggagtg

SEQ ID NO: 162378 - DNA, 17 bp, Arabidopsis thaliana
ttcgactagcaactgcc

SEQ ID NO: 162379 - DNA, 17 bp, Arabidopsis thaliana
ttcgactcagaaacctc

SEQ ID NO: 162380 - DNA, 17 bp, Arabidopsis thaliana
ttcgactcagaaccctc

SEQ ID NO: 162381 - DNA, 17 bp, Arabidopsis thaliana
ttcgactcccactgtgt

SEQ ID NO: 162382 - DNA, 17 bp, Arabidopsis thaliana
ttcgactcccggcagac

SEQ ID NO: 162383 - DNA, 17 bp, Arabidopsis thaliana
ttcgactcccggtagga

SEQ ID NO: 162384 - DNA, 17 bp, Arabidopsis thaliana
ttcgactcctatcgccg

SEQ ID NO: 162385 - DNA, 17 bp, Arabidopsis thaliana
ttcgactctccgcaagg

SEQ ID NO: 162386 - DNA, 17 bp, Arabidopsis thaliana
ttcgactgggaacggct

SEQ ID NO: 162387 - DNA, 17 bp, Arabidopsis thaliana
ttcgacttaatccgact

SEQ ID NO: 162388 - DNA, 17 bp, Arabidopsis thaliana
ttcgacttcccctggga

SEQ ID NO: 162389 - DNA, 17 bp, Arabidopsis thaliana
ttcgacttcccctgggc

SEQ ID NO: 162390 - DNA, 17 bp, Arabidopsis thaliana
ttcgacttcccctgggg

SEQ ID NO: 162391 - DNA, 17 bp, Arabidopsis thaliana
ttcgacttcccttgggg

SEQ ID NO: 162392 - DNA, 17 bp, Arabidopsis thaliana
ttcgacttcctctgggg

SEQ ID NO: 162393 - DNA, 17 bp, Arabidopsis thaliana
ttcgacttcctgggggt

SEQ ID NO: 162394 - DNA, 17 bp, Arabidopsis thaliana
ttcgacttcgcctgggg

SEQ ID NO: 162395 - DNA, 17 bp, Arabidopsis thaliana
ttcgacttgccctgggg

SEQ ID NO: 162396 - DNA, 17 bp, Arabidopsis thaliana
ttcgacttttgagattg

SEQ ID NO: 162397 - DNA, 17 bp, Arabidopsis thaliana
ttcgagaatagcgtctg

SEQ ID NO: 162398 - DNA, 17 bp, Arabidopsis thaliana
ttcgagaatcgattcac

SEQ ID NO: 162399 - DNA, 17 bp, Arabidopsis thaliana
ttcgagacacgttggga

SEQ ID NO: 162400 - DNA, 17 bp, Arabidopsis thaliana
ttcgagagacccgggtt

SEQ ID NO: 162401 - DNA, 17 bp, Arabidopsis thaliana
ttcgagatccaatgcaa

SEQ ID NO: 162402 - DNA, 17 bp, Arabidopsis thaliana
ttcgagatccaggtagc

SEQ ID NO: 162403 - DNA, 17 bp, Arabidopsis thaliana
ttcgagatccgaccatc

SEQ ID NO: 162404 - DNA, 17 bp, Arabidopsis thaliana
ttcgagcaaagcttaca

SEQ ID NO: 162405 - DNA, 17 bp, Arabidopsis thaliana
ttcgagccatcagttcc

SEQ ID NO: 162406 - DNA, 17 bp, Arabidopsis thaliana
ttcgagccccgccggaa

SEQ ID NO: 162407 - DNA, 17 bp, Arabidopsis thaliana
ttcgagccccgccggga

SEQ ID NO: 162408 - DNA, 17 bp, Arabidopsis thaliana
ttcgagcgatccaaaga

SEQ ID NO: 162409 - DNA, 17 bp, Arabidopsis thaliana
ttcgagcgatccaaagc

SEQ ID NO: 162410 - DNA, 17 bp, Arabidopsis thaliana
ttcgagcggtccaaagc

SEQ ID NO: 162411 - DNA, 17 bp, Arabidopsis thaliana
ttcgagctttgggggcc

SEQ ID NO: 162412 - DNA, 17 bp, Arabidopsis thaliana
ttcgaggaatagttaaa

SEQ ID NO: 162413 - DNA, 17 bp, Arabidopsis thaliana
ttcgaggaatgggctaa

SEQ ID NO: 162414 - DNA, 17 bp, Arabidopsis thaliana
ttcgaggatagaccgga

SEQ ID NO: 162415 - DNA, 17 bp, Arabidopsis thaliana
ttcgaggcctaggggtg

SEQ ID NO: 162416 - DNA, 17 bp, Arabidopsis thaliana
ttcgaggcctattaaac

SEQ ID NO: 162417 - DNA, 17 bp, Arabidopsis thaliana
ttcgaggcgcccgtgac

SEQ ID NO: 162418 - DNA, 17 bp, Arabidopsis thaliana
ttcgaggcgctgttagt

SEQ ID NO: 162419 - DNA, 17 bp, Arabidopsis thaliana
ttcgagggattacgagt

SEQ ID NO: 162420 - DNA, 17 bp, Arabidopsis thaliana
ttcgaggtaagcgaccg

SEQ ID NO: 162421 - DNA, 17 bp, Arabidopsis thaliana
ttcgagtaccaggcgct

SEQ ID NO: 162422 - DNA, 17 bp, Arabidopsis thaliana
ttcgagtattatgccca

SEQ ID NO: 162423 - DNA, 17 bp, Arabidopsis thaliana
ttcgagtcccaccgggt

SEQ ID NO: 162424 - DNA, 17 bp, Arabidopsis thaliana
ttcgagtcccagctact

SEQ ID NO: 162425 - DNA, 17 bp, Arabidopsis thaliana
ttcgagtcccgggcaac

SEQ ID NO: 162426 - DNA, 17 bp, Arabidopsis thaliana
ttcgagtccgagtagcg

SEQ ID NO: 162427 - DNA, 17 bp, Arabidopsis thaliana
ttcgagtccgccccccc

SEQ ID NO: 162428 - DNA, 17 bp, Arabidopsis thaliana
ttcgagtccgcttatct

SEQ ID NO: 162429 - DNA, 17 bp, Arabidopsis thaliana
ttcgagtccgtatagcc

SEQ ID NO: 162430 - DNA, 17 bp, Arabidopsis thaliana
ttcgagtcctgttcgga

SEQ ID NO: 162431 - DNA, 17 bp, Arabidopsis thaliana
ttcgagtcctgttcggg

SEQ ID NO: 162432 - DNA, 17 bp, Arabidopsis thaliana
ttcgagtggcatttttt

SEQ ID NO: 162433 - DNA, 17 bp, Arabidopsis thaliana
ttcgagtgtgagcatgc

SEQ ID NO: 162434 - DNA, 17 bp, Arabidopsis thaliana
ttcgagttcgggtcggt

SEQ ID NO: 162435 - DNA, 17 bp, Arabidopsis thaliana
ttcgagttggttttcga

SEQ ID NO: 162436 - DNA, 17 bp, Arabidopsis thaliana
ttcgagttgtcacagaa

SEQ ID NO: 162437 - DNA, 17 bp, Arabidopsis thaliana
ttcgagttgtcacagag

SEQ ID NO: 162438 - DNA, 17 bp, Arabidopsis thaliana
ttcgataacttttggag

SEQ ID NO: 162439 - DNA, 17 bp, Arabidopsis thaliana
ttcgatacggagttttc

SEQ ID NO: 162440 - DNA, 17 bp, Arabidopsis thaliana
ttcgatagttggtgacg

SEQ ID NO: 162441 - DNA, 17 bp, Arabidopsis thaliana
ttcgatcaggcactcgc

SEQ ID NO: 162442 - DNA, 17 bp, Arabidopsis thaliana
ttcgatccacgctcacc

SEQ ID NO: 162443 - DNA, 17 bp, Arabidopsis thaliana
ttcgatccccactgccc

SEQ ID NO: 162444 - DNA, 17 bp, Arabidopsis thaliana
ttcgatccccagcagag

SEQ ID NO: 162445 - DNA, 17 bp, Arabidopsis thaliana
ttcgatccccggctggt

SEQ ID NO: 162446 - DNA, 17 bp, Arabidopsis thaliana
ttcgatcccgcttggct

SEQ ID NO: 162447 - DNA, 17 bp, Arabidopsis thaliana
ttcgatcccggttgaga

SEQ ID NO: 162448 - DNA, 17 bp, Arabidopsis thaliana
ttcgatccctgtatagg

SEQ ID NO: 162449 - DNA, 17 bp, Arabidopsis thaliana
ttcgatcctattgtgtt

SEQ ID NO: 162450 - DNA, 17 bp, Arabidopsis thaliana
ttcgatcctcgccgggg

SEQ ID NO: 162451 - DNA, 17 bp, Arabidopsis thaliana
ttcgatcctgagcagca

SEQ ID NO: 162452 - DNA, 17 bp, Arabidopsis thaliana
ttcgatcctgcgtgagg

SEQ ID NO: 162453 - DNA, 17 bp, Arabidopsis thaliana
ttcgatcctgcgtgtgg

SEQ ID NO: 162454 - DNA, 17 bp, Arabidopsis thaliana
ttcgatcctgcgtgtgt

SEQ ID NO: 162455 - DNA, 17 bp, Arabidopsis thaliana
ttcgatcctgggcagaa

SEQ ID NO: 162456 - DNA, 17 bp, Arabidopsis thaliana
ttcgatcctgggcagca

SEQ ID NO: 162457 - DNA, 17 bp, Arabidopsis thaliana
ttcgatcctgggcagga

SEQ ID NO: 162458 - DNA, 17 bp, Arabidopsis thaliana
ttcgatcgccaactgca

SEQ ID NO: 162459 - DNA, 17 bp, Arabidopsis thaliana
ttcgatctccagtggag

SEQ ID NO: 162460 - DNA, 17 bp, Arabidopsis thaliana
ttcgatctcgggaacat

SEQ ID NO: 162461 - DNA, 17 bp, Arabidopsis thaliana
ttcgatctgttaatttc

SEQ ID NO: 162462 - DNA, 17 bp, Arabidopsis thaliana
ttcgatcttaaatcggg

SEQ ID NO: 162463 - DNA, 17 bp, Arabidopsis thaliana
ttcgatcttacgtgtca

SEQ ID NO: 162464 - DNA, 17 bp, Arabidopsis thaliana
ttcgatgaagtctcgga

SEQ ID NO: 162465 - DNA, 17 bp, Arabidopsis thaliana
ttcgatgatgtcggctc

SEQ ID NO: 162466 - DNA, 17 bp, Arabidopsis thaliana
ttcgatgcgcatatcgc

SEQ ID NO: 162467 - DNA, 17 bp, Arabidopsis thaliana
ttcgatggttgatgtgt

SEQ ID NO: 162468 - DNA, 17 bp, Arabidopsis thaliana
ttcgatgtcggctcttc

SEQ ID NO: 162469 - DNA, 17 bp, Arabidopsis thaliana
ttcgatgtcgtccagcg

SEQ ID NO: 162470 - DNA, 17 bp, Arabidopsis thaliana
ttcgatgtctaccagtg

SEQ ID NO: 162471 - DNA, 17 bp, Arabidopsis thaliana
ttcgatgtctagcagtg

SEQ ID NO: 162472 - DNA, 17 bp, Arabidopsis thaliana
ttcgatgtgcgcgacgt

SEQ ID NO: 162473 - DNA, 17 bp, Arabidopsis thaliana
ttcgatgtgcgcgactt

SEQ ID NO: 162474 - DNA, 17 bp, Arabidopsis thaliana
ttcgatgtgggaccttt

SEQ ID NO: 162475 - DNA, 17 bp, Arabidopsis thaliana
ttcgattaacgcggacg

SEQ ID NO: 162476 - DNA, 17 bp, Arabidopsis thaliana
ttcgattatgcctttgt

SEQ ID NO: 162477 - DNA, 17 bp, Arabidopsis thaliana
ttcgattcacgtcgggt

SEQ ID NO: 162478 - DNA, 17 bp, Arabidopsis thaliana
ttcgattccactaagtc

SEQ ID NO: 162479 - DNA, 17 bp, Arabidopsis thaliana
ttcgattccccgcacct

SEQ ID NO: 162480 - DNA, 17 bp, Arabidopsis thaliana
ttcgattcccgcctgcc

SEQ ID NO: 162481 - DNA, 17 bp, Arabidopsis thaliana
ttcgattcccgctaccc

SEQ ID NO: 162482 - DNA, 17 bp, Arabidopsis thaliana
ttcgattcccgctatcc

SEQ ID NO: 162483 - DNA, 17 bp, Arabidopsis thaliana
ttcgattcccggctgct

SEQ ID NO: 162484 - DNA, 17 bp, Arabidopsis thaliana
ttcgattcccggctgga

SEQ ID NO: 162485 - DNA, 17 bp, Arabidopsis thaliana
ttcgattcccggctggt

SEQ ID NO: 162486 - DNA, 17 bp, Arabidopsis thaliana
ttcgattcccgtcctcg

SEQ ID NO: 162487 - DNA, 17 bp, Arabidopsis thaliana
ttcgattccctgctggt

SEQ ID NO: 162488 - DNA, 17 bp, Arabidopsis thaliana
ttcgattccgatagccg

SEQ ID NO: 162489 - DNA, 17 bp, Arabidopsis thaliana
ttcgattccggagaggg

SEQ ID NO: 162490 - DNA, 17 bp, Arabidopsis thaliana
ttcgattccggcaggcc

SEQ ID NO: 162491 - DNA, 17 bp, Arabidopsis thaliana
ttcgattccggcaggtc

SEQ ID NO: 162492 - DNA, 17 bp, Arabidopsis thaliana
ttcgattcctacttggg

SEQ ID NO: 162493 - DNA, 17 bp, Arabidopsis thaliana
ttcgattcctggctggt

SEQ ID NO: 162494 - DNA, 17 bp, Arabidopsis thaliana
ttcgattcggatattgg

SEQ ID NO: 162495 - DNA, 17 bp, Arabidopsis thaliana
ttcgattcgtcgcagtt

SEQ ID NO: 162496 - DNA, 17 bp, Arabidopsis thaliana
ttcgattctcggaacac

SEQ ID NO: 162497 - DNA, 17 bp, Arabidopsis thaliana
ttcgattctcggaacgc

SEQ ID NO: 162498 - DNA, 17 bp, Arabidopsis thaliana
ttcgattctcggaatga

SEQ ID NO: 162499 - DNA, 17 bp, Arabidopsis thaliana
ttcgattctcggaatgc

SEQ ID NO: 162500 - DNA, 17 bp, Arabidopsis thaliana
ttcgattctcggctggt

SEQ ID NO: 162501 - DNA, 17 bp, Arabidopsis thaliana
ttcgattgagcttctca

SEQ ID NO: 162502 - DNA, 17 bp, Arabidopsis thaliana
ttcgattgagtttccgc

SEQ ID NO: 162503 - DNA, 17 bp, Arabidopsis thaliana
ttcgattgagttttcgc

SEQ ID NO: 162504 - DNA, 17 bp, Arabidopsis thaliana
ttcgatttaaccggggt

SEQ ID NO: 162505 - DNA, 17 bp, Arabidopsis thaliana
ttcgatttcagtcgcca

SEQ ID NO: 162506 - DNA, 17 bp, Arabidopsis thaliana
ttcgatttccggctggt

SEQ ID NO: 162507 - DNA, 17 bp, Arabidopsis thaliana
ttcgatttgatcctccg

SEQ ID NO: 162508 - DNA, 17 bp, Arabidopsis thaliana
ttcgatttgattctccg

SEQ ID NO: 162509 - DNA, 17 bp, Arabidopsis thaliana
ttcgatttggattcggt

SEQ ID NO: 162510 - DNA, 17 bp, Arabidopsis thaliana
ttcgcaaaaaggccttt

SEQ ID NO: 162511 - DNA, 17 bp, Arabidopsis thaliana
ttcgcaaagattggttg

SEQ ID NO: 162512 - DNA, 17 bp, Arabidopsis thaliana
ttcgcaaagttttggct

SEQ ID NO: 162513 - DNA, 17 bp, Arabidopsis thaliana
ttcgcaacgatttgtta

SEQ ID NO: 162514 - DNA, 17 bp, Arabidopsis thaliana
ttcgcaacttggagatc

SEQ ID NO: 162515 - DNA, 17 bp, Arabidopsis thaliana
ttcgcaagactgctttc

SEQ ID NO: 162516 - DNA, 17 bp, Arabidopsis thaliana
ttcgcaagaggcttacc

SEQ ID NO: 162517 - DNA, 17 bp, Arabidopsis thaliana
ttcgcaaggtggtccga

SEQ ID NO: 162518 - DNA, 17 bp, Arabidopsis thaliana
ttcgcacaattggtcat

SEQ ID NO: 162519 - DNA, 17 bp, Arabidopsis thaliana
ttcgcacagatatgatt

SEQ ID NO: 162520 - DNA, 17 bp, Arabidopsis thaliana
ttcgcacagttccgaca

SEQ ID NO: 162521 - DNA, 17 bp, Arabidopsis thaliana
ttcgcaccaaataccct

SEQ ID NO: 162522 - DNA, 17 bp, Arabidopsis thaliana
ttcgcaccaaataccgt

SEQ ID NO: 162523 - DNA, 17 bp, Arabidopsis thaliana
ttcgcaccaccatccaa

SEQ ID NO: 162524 - DNA, 17 bp, Arabidopsis thaliana
ttcgcaccaggcttcat

SEQ ID NO: 162525 - DNA, 17 bp, Arabidopsis thaliana
ttcgcacccgggctcag

SEQ ID NO: 162526 - DNA, 17 bp, Arabidopsis thaliana
ttcgcaccggaaaggct

SEQ ID NO: 162527 - DNA, 17 bp, Arabidopsis thaliana
ttcgcacgctcaatgat

SEQ ID NO: 162528 - DNA, 17 bp, Arabidopsis thaliana
ttcgcacgtctgcctgg

SEQ ID NO: 162529 - DNA, 17 bp, Arabidopsis thaliana
ttcgcactaaatgatcg

SEQ ID NO: 162530 - DNA, 17 bp, Arabidopsis thaliana
ttcgcactgaacgggtt

SEQ ID NO: 162531 - DNA, 17 bp, Arabidopsis thaliana
ttcgcactgaactgctt

SEQ ID NO: 162532 - DNA, 17 bp, Arabidopsis thaliana
ttcgcactttactggga

SEQ ID NO: 162533 - DNA, 17 bp, Arabidopsis thaliana
ttcgcagacaagttggt

SEQ ID NO: 162534 - DNA, 17 bp, Arabidopsis thaliana
ttcgcagatggattcag

SEQ ID NO: 162535 - DNA, 17 bp, Arabidopsis thaliana
ttcgcagatggtccgct

SEQ ID NO: 162536 - DNA, 17 bp, Arabidopsis thaliana
ttcgcagcagcagataa

SEQ ID NO: 162537 - DNA, 17 bp, Arabidopsis thaliana
ttcgcagcggaattgac

SEQ ID NO: 162538 - DNA, 17 bp, Arabidopsis thaliana
ttcgcagcttccatctt

SEQ ID NO: 162539 - DNA, 17 bp, Arabidopsis thaliana
ttcgcaggaacattcta

SEQ ID NO: 162540 - DNA, 17 bp, Arabidopsis thaliana
ttcgcaggagagatacc

SEQ ID NO: 162541 - DNA, 17 bp, Arabidopsis thaliana
ttcgcaggagagataga

SEQ ID NO: 162542 - DNA, 17 bp, Arabidopsis thaliana
ttcgcaggagagatagc

SEQ ID NO: 162543 - DNA, 17 bp, Arabidopsis thaliana
ttcgcaggagagatccc

SEQ ID NO: 162544 - DNA, 17 bp, Arabidopsis thaliana
ttcgcaggagagatcgc

SEQ ID NO: 162545 - DNA, 17 bp, Arabidopsis thaliana
ttcgcaggaggtccgaa

SEQ ID NO: 162546 - DNA, 17 bp, Arabidopsis thaliana
ttcgcagggggtccgaa

SEQ ID NO: 162547 - DNA, 17 bp, Arabidopsis thaliana
ttcgcaggtgaccttac

SEQ ID NO: 162548 - DNA, 17 bp, Arabidopsis thaliana
ttcgcaggtgtggttgc

SEQ ID NO: 162549 - DNA, 17 bp, Arabidopsis thaliana
ttcgcagttaagtgtgc

SEQ ID NO: 162550 - DNA, 17 bp, Arabidopsis thaliana
ttcgcagttgttcgtct

SEQ ID NO: 162551 - DNA, 17 bp, Arabidopsis thaliana
ttcgcatgcgggaactc

SEQ ID NO: 162552 - DNA, 17 bp, Arabidopsis thaliana
ttcgccaccttcaagac

SEQ ID NO: 162553 - DNA, 17 bp, Arabidopsis thaliana
ttcgccaggttcagctt

SEQ ID NO: 162554 - DNA, 17 bp, Arabidopsis thaliana
ttcgccatctattttgg

SEQ ID NO: 162555 - DNA, 17 bp, Arabidopsis thaliana
ttcgccattcacttttc

SEQ ID NO: 162556 - DNA, 17 bp, Arabidopsis thaliana
ttcgcccaaaagaggct

SEQ ID NO: 162557 - DNA, 17 bp, Arabidopsis thaliana
ttcgcccatttgtttgc

SEQ ID NO: 162558 - DNA, 17 bp, Arabidopsis thaliana
ttcgccccctacctggc

SEQ ID NO: 162559 - DNA, 17 bp, Arabidopsis thaliana
ttcgccccctacctggt

SEQ ID NO: 162560 - DNA, 17 bp, Arabidopsis thaliana
ttcgccccctccctccc

SEQ ID NO: 162561 - DNA, 17 bp, Arabidopsis thaliana
ttcgccccctctctcta

SEQ ID NO: 162562 - DNA, 17 bp, Arabidopsis thaliana
ttcgcccggacctcagc

SEQ ID NO: 162563 - DNA, 17 bp, Arabidopsis thaliana
ttcgcccgtggcacgcc

SEQ ID NO: 162564 - DNA, 17 bp, Arabidopsis thaliana
ttcgccctgctcaggtt

SEQ ID NO: 162565 - DNA, 17 bp, Arabidopsis thaliana
ttcgccctgggtcccac

SEQ ID NO: 162566 - DNA, 17 bp, Arabidopsis thaliana
ttcgccgatttgctgac

SEQ ID NO: 162567 - DNA, 17 bp, Arabidopsis thaliana
ttcgccgcccgcgacgt

SEQ ID NO: 162568 - DNA, 17 bp, Arabidopsis thaliana
ttcgccggaaagatggt

SEQ ID NO: 162569 - DNA, 17 bp, Arabidopsis thaliana
ttcgccgggtgaaatca

SEQ ID NO: 162570 - DNA, 17 bp, Arabidopsis thaliana
ttcgccgtatcgcatgt

SEQ ID NO: 162571 - DNA, 17 bp, Arabidopsis thaliana
ttcgccgtcgtaagtag

SEQ ID NO: 162572 - DNA, 17 bp, Arabidopsis thaliana
ttcgccgtgggtcccac

SEQ ID NO: 162573 - DNA, 17 bp, Arabidopsis thaliana
ttcgccgttttctttag

SEQ ID NO: 162574 - DNA, 17 bp, Arabidopsis thaliana
ttcgccgtttttccgac

SEQ ID NO: 162575 - DNA, 17 bp, Arabidopsis thaliana
ttcgcctaagtcgcagg

SEQ ID NO: 162576 - DNA, 17 bp, Arabidopsis thaliana
ttcgcctagggtcttta

SEQ ID NO: 162577 - DNA, 17 bp, Arabidopsis thaliana
ttcgcctcaaccgccgt

SEQ ID NO: 162578 - DNA, 17 bp, Arabidopsis thaliana
ttcgcctcagatctagc

SEQ ID NO: 162579 - DNA, 17 bp, Arabidopsis thaliana
ttcgcctgcagagagaa

SEQ ID NO: 162580 - DNA, 17 bp, Arabidopsis thaliana
ttcgcctgcggcacggc

SEQ ID NO: 162581 - DNA, 17 bp, Arabidopsis thaliana
ttcgcgacggaatagcg

SEQ ID NO: 162582 - DNA, 17 bp, Arabidopsis thaliana
ttcgcgagatgacttga

SEQ ID NO: 162583 - DNA, 17 bp, Arabidopsis thaliana
ttcgcgagtcaggtcgt

SEQ ID NO: 162584 - DNA, 17 bp, Arabidopsis thaliana
ttcgcgagtgttccttg

SEQ ID NO: 162585 - DNA, 17 bp, Arabidopsis thaliana
ttcgcgatctcggattc

SEQ ID NO: 162586 - DNA, 17 bp, Arabidopsis thaliana
ttcgcggattgtctgac

SEQ ID NO: 162587 - DNA, 17 bp, Arabidopsis thaliana
ttcgcgggacttaacat

SEQ ID NO: 162588 - DNA, 17 bp, Arabidopsis thaliana
ttcgcgggagtctttgt

SEQ ID NO: 162589 - DNA, 17 bp, Arabidopsis thaliana
ttcgcggtgatctcggt

SEQ ID NO: 162590 - DNA, 17 bp, Arabidopsis thaliana
ttcgcgtatcggcatga

SEQ ID NO: 162591 - DNA, 17 bp, Arabidopsis thaliana
ttcgcgtcacgcgctcc

SEQ ID NO: 162592 - DNA, 17 bp, Arabidopsis thaliana
ttcgcgtctactaatcc

SEQ ID NO: 162593 - DNA, 17 bp, Arabidopsis thaliana
ttcgcgtgcagagagaa

SEQ ID NO: 162594 - DNA, 17 bp, Arabidopsis thaliana
ttcgcgtgctgctttct

SEQ ID NO: 162595 - DNA, 17 bp, Arabidopsis thaliana
ttcgcgtgtggttgcct

SEQ ID NO: 162596 - DNA, 17 bp, Arabidopsis thaliana
ttcgctaaaatatcagc

SEQ ID NO: 162597 - DNA, 17 bp, Arabidopsis thaliana
ttcgctacagttctttg

SEQ ID NO: 162598 - DNA, 17 bp, Arabidopsis thaliana
ttcgctacagttgctcg

SEQ ID NO: 162599 - DNA, 17 bp, Arabidopsis thaliana
ttcgctactagctcgca

SEQ ID NO: 162600 - DNA, 17 bp, Arabidopsis thaliana
ttcgctagcttcccatt

SEQ ID NO: 162601 - DNA, 17 bp, Arabidopsis thaliana
ttcgctagggacgtcgc

SEQ ID NO: 162602 - DNA, 17 bp, Arabidopsis thaliana
ttcgctagtgtcgttcc

SEQ ID NO: 162603 - DNA, 17 bp, Arabidopsis thaliana
ttcgctatcctctgcag

SEQ ID NO: 162604 - DNA, 17 bp, Arabidopsis thaliana
ttcgctatcctctgcat

SEQ ID NO: 162605 - DNA, 17 bp, Arabidopsis thaliana
ttcgctatcgcttttct

SEQ ID NO: 162606 - DNA, 17 bp, Arabidopsis thaliana
ttcgctcagtgactatg

SEQ ID NO: 162607 - DNA, 17 bp, Arabidopsis thaliana
ttcgctccacatccttt

SEQ ID NO: 162608 - DNA, 17 bp, Arabidopsis thaliana
ttcgctccgctctattt

SEQ ID NO: 162609 - DNA, 17 bp, Arabidopsis thaliana
ttcgctccgtagaggcg

SEQ ID NO: 162610 - DNA, 17 bp, Arabidopsis thaliana
ttcgctcctaccgatcg

SEQ ID NO: 162611 - DNA, 17 bp, Arabidopsis thaliana
ttcgctcctaccgattg

SEQ ID NO: 162612 - DNA, 17 bp, Arabidopsis thaliana
ttcgctcctgggcagca

SEQ ID NO: 162613 - DNA, 17 bp, Arabidopsis thaliana
ttcgctctccggaacta

SEQ ID NO: 162614 - DNA, 17 bp, Arabidopsis thaliana
ttcgctctgctagttat

SEQ ID NO: 162615 - DNA, 17 bp, Arabidopsis thaliana
ttcgctgaaccaatgat

SEQ ID NO: 162616 - DNA, 17 bp, Arabidopsis thaliana
ttcgctgaaccaatggt

SEQ ID NO: 162617 - DNA, 17 bp, Arabidopsis thaliana
ttcgctgaactaatggt

SEQ ID NO: 162618 - DNA, 17 bp, Arabidopsis thaliana
ttcgctgacgtggcact

SEQ ID NO: 162619 - DNA, 17 bp, Arabidopsis thaliana
ttcgctgagtccacgtc

SEQ ID NO: 162620 - DNA, 17 bp, Arabidopsis thaliana
ttcgctgcgagttggcc

SEQ ID NO: 162621 - DNA, 17 bp, Arabidopsis thaliana
ttcgctgcgagttggtc

SEQ ID NO: 162622 - DNA, 17 bp, Arabidopsis thaliana
ttcgctggcaagcagct

SEQ ID NO: 162623 - DNA, 17 bp, Arabidopsis thaliana
ttcgctggcagagagaa

SEQ ID NO: 162624 - DNA, 17 bp, Arabidopsis thaliana
ttcgctggctaatatgg

SEQ ID NO: 162625 - DNA, 17 bp, Arabidopsis thaliana
ttcgctggctaatgtgg

SEQ ID NO: 162626 - DNA, 17 bp, Arabidopsis thaliana
ttcgctggtagtgagga

SEQ ID NO: 162627 - DNA, 17 bp, Arabidopsis thaliana
ttcgctgttcgcctgga

SEQ ID NO: 162628 - DNA, 17 bp, Arabidopsis thaliana
ttcgcttaaatgccttg

SEQ ID NO: 162629 - DNA, 17 bp, Arabidopsis thaliana
ttcgcttaagaggatga

SEQ ID NO: 162630 - DNA, 17 bp, Arabidopsis thaliana
ttcgcttcaacgatttt

SEQ ID NO: 162631 - DNA, 17 bp, Arabidopsis thaliana
ttcgcttccagagagaa

SEQ ID NO: 162632 - DNA, 17 bp, Arabidopsis thaliana
ttcgcttgacgattttg

SEQ ID NO: 162633 - DNA, 17 bp, Arabidopsis thaliana
ttcgcttgactctagtc

SEQ ID NO: 162634 - DNA, 17 bp, Arabidopsis thaliana
ttcgcttgcacagagaa

SEQ ID NO: 162635 - DNA, 17 bp, Arabidopsis thaliana
ttcgcttgcagaaatca

SEQ ID NO: 162636 - DNA, 17 bp, Arabidopsis thaliana
ttcgcttgcagacagaa

SEQ ID NO: 162637 - DNA, 17 bp, Arabidopsis thaliana
ttcgcttgcagagaaat

SEQ ID NO: 162638 - DNA, 17 bp, Arabidopsis thaliana
ttcgcttgcagagacaa

SEQ ID NO: 162639 - DNA, 17 bp, Arabidopsis thaliana
ttcgcttgcagagagaa

SEQ ID NO: 162640 - DNA, 17 bp, Arabidopsis thaliana
ttcgcttgcagagagat

SEQ ID NO: 162641 - DNA, 17 bp, Arabidopsis thaliana
ttcgcttgcagagagga

SEQ ID NO: 162642 - DNA, 17 bp, Arabidopsis thaliana
ttcgcttgcagagataa

SEQ ID NO: 162643 - DNA, 17 bp, Arabidopsis thaliana
ttcgcttgcagagggaa

SEQ ID NO: 162644 - DNA, 17 bp, Arabidopsis thaliana
ttcgcttgcagagtcaa

SEQ ID NO: 162645 - DNA, 17 bp, Arabidopsis thaliana
ttcgcttgcagggagaa

SEQ ID NO: 162646 - DNA, 17 bp, Arabidopsis thaliana
ttcgcttgcatagagaa

SEQ ID NO: 162647 - DNA, 17 bp, Arabidopsis thaliana
ttcgcttgcggagagaa

SEQ ID NO: 162648 - DNA, 17 bp, Arabidopsis thaliana
ttcgcttgctgagagaa

SEQ ID NO: 162649 - DNA, 17 bp, Arabidopsis thaliana
ttcgcttggagagagaa

SEQ ID NO: 162650 - DNA, 17 bp, Arabidopsis thaliana
ttcgcttgtgtgcccca

SEQ ID NO: 162651 - DNA, 17 bp, Arabidopsis thaliana
ttcgctttcaagatcta

SEQ ID NO: 162652 - DNA, 17 bp, Arabidopsis thaliana
ttcgctttgatcgtatg

SEQ ID NO: 162653 - DNA, 17 bp, Arabidopsis thaliana
ttcgctttggcccaccc

SEQ ID NO: 162654 - DNA, 17 bp, Arabidopsis thaliana
ttcgctttggccgagtg

SEQ ID NO: 162655 - DNA, 17 bp, Arabidopsis thaliana
ttcgctttgggttcggt

SEQ ID NO: 162656 - DNA, 17 bp, Arabidopsis thaliana
ttcggaaacgggacacg

SEQ ID NO: 162657 - DNA, 17 bp, Arabidopsis thaliana
ttcggaaagagtttaga

SEQ ID NO: 162658 - DNA, 17 bp, Arabidopsis thaliana
ttcggaaagcccaaaga

SEQ ID NO: 162659 - DNA, 17 bp, Arabidopsis thaliana
ttcggaaatttgcgtgg

SEQ ID NO: 162660 - DNA, 17 bp, Arabidopsis thaliana
ttcggaaccgtctgtca

SEQ ID NO: 162661 - DNA, 17 bp, Arabidopsis thaliana
ttcggaaccgtctgtga

SEQ ID NO: 162662 - DNA, 17 bp, Arabidopsis thaliana
ttcggaaccgtctgtgc

SEQ ID NO: 162663 - DNA, 17 bp, Arabidopsis thaliana
ttcggaacctctaagtg

SEQ ID NO: 162664 - DNA, 17 bp, Arabidopsis thaliana
ttcggaagtcctcgtgt

SEQ ID NO: 162665 - DNA, 17 bp, Arabidopsis thaliana
ttcggaagtttgctcga

SEQ ID NO: 162666 - DNA, 17 bp, Arabidopsis thaliana
ttcggaattttttgaac

SEQ ID NO: 162667 - DNA, 17 bp, Arabidopsis thaliana
ttcggacaaagcggtat

SEQ ID NO: 162668 - DNA, 17 bp, Arabidopsis thaliana
ttcggacactgacggct

SEQ ID NO: 162669 - DNA, 17 bp, Arabidopsis thaliana
ttcggacattttcgtga

SEQ ID NO: 162670 - DNA, 17 bp, Arabidopsis thaliana
ttcggaccacgcttcat

SEQ ID NO: 162671 - DNA, 17 bp, Arabidopsis thaliana
ttcggaccagacttcat

SEQ ID NO: 162672 - DNA, 17 bp, Arabidopsis thaliana
ttcggaccagccttcat

SEQ ID NO: 162673 - DNA, 17 bp, Arabidopsis thaliana
ttcggaccaggcatcat

SEQ ID NO: 162674 - DNA, 17 bp, Arabidopsis thaliana
ttcggaccaggcctcat

SEQ ID NO: 162675 - DNA, 17 bp, Arabidopsis thaliana
ttcggaccaggccttat

SEQ ID NO: 162676 - DNA, 17 bp, Arabidopsis thaliana
ttcggaccaggctacat

SEQ ID NO: 162677 - DNA, 17 bp, Arabidopsis thaliana
ttcggaccaggctccat

SEQ ID NO: 162678 - DNA, 17 bp, Arabidopsis thaliana
ttcggaccaggcttatt

SEQ ID NO: 162679 - DNA, 17 bp, Arabidopsis thaliana
ttcggaccaggcttcaa

SEQ ID NO: 162680 - DNA, 17 bp, Arabidopsis thaliana
ttcggaccaggcttcac

SEQ ID NO: 162681 - DNA, 17 bp, Arabidopsis thaliana
ttcggaccaggcttcag

SEQ ID NO: 162682 - DNA, 17 bp, Arabidopsis thaliana
ttcggaccaggcttcat

SEQ ID NO: 162683 - DNA, 17 bp, Arabidopsis thaliana
ttcggaccaggcttccc

SEQ ID NO: 162684 - DNA, 17 bp, Arabidopsis thaliana
ttcggaccaggcttcct

SEQ ID NO: 162685 - DNA, 17 bp, Arabidopsis thaliana
ttcggaccaggcttcgt

SEQ ID NO: 162686 - DNA, 17 bp, Arabidopsis thaliana
ttcggaccaggcttctc

SEQ ID NO: 162687 - DNA, 17 bp, Arabidopsis thaliana
ttcggaccaggcttctt

SEQ ID NO: 162688 - DNA, 17 bp, Arabidopsis thaliana
ttcggaccaggcttgat

SEQ ID NO: 162689 - DNA, 17 bp, Arabidopsis thaliana
ttcggaccaggctttat

SEQ ID NO: 162690 - DNA, 17 bp, Arabidopsis thaliana
ttcggaccaggtttcat

SEQ ID NO: 162691 - DNA, 17 bp, Arabidopsis thaliana
ttcggaccccacagcct

SEQ ID NO: 162692 - DNA, 17 bp, Arabidopsis thaliana
ttcggacccgggcgaag

SEQ ID NO: 162693 - DNA, 17 bp, Arabidopsis thaliana
ttcggacccgggctcag

SEQ ID NO: 162694 - DNA, 17 bp, Arabidopsis thaliana
ttcggacccggttgagc

SEQ ID NO: 162695 - DNA, 17 bp, Arabidopsis thaliana
ttcggaccgttcttacc

SEQ ID NO: 162696 - DNA, 17 bp, Arabidopsis thaliana
ttcggacctaggggatt

SEQ ID NO: 162697 - DNA, 17 bp, Arabidopsis thaliana
ttcggacctgcaaagat

SEQ ID NO: 162698 - DNA, 17 bp, Arabidopsis thaliana
ttcggacctgtggggat

SEQ ID NO: 162699 - DNA, 17 bp, Arabidopsis thaliana
ttcggacgaagagtttg

SEQ ID NO: 162700 - DNA, 17 bp, Arabidopsis thaliana
ttcggacgaccgggtga

SEQ ID NO: 162701 - DNA, 17 bp, Arabidopsis thaliana
ttcggacgtgctcctac

SEQ ID NO: 162702 - DNA, 17 bp, Arabidopsis thaliana
ttcggactaggcttcat

SEQ ID NO: 162703 - DNA, 17 bp, Arabidopsis thaliana
ttcggactctgctgttg

SEQ ID NO: 162704 - DNA, 17 bp, Arabidopsis thaliana
ttcggactgtggatcca

SEQ ID NO: 162705 - DNA, 17 bp, Arabidopsis thaliana
ttcggacttaccgcctt

SEQ ID NO: 162706 - DNA, 17 bp, Arabidopsis thaliana
ttcggactttcggattt

SEQ ID NO: 162707 - DNA, 17 bp, Arabidopsis thaliana
ttcggagacgacggcac

SEQ ID NO: 162708 - DNA, 17 bp, Arabidopsis thaliana
ttcggagacgtcggcgg

SEQ ID NO: 162709 - DNA, 17 bp, Arabidopsis thaliana
ttcggagattcgtccca

SEQ ID NO: 162710 - DNA, 17 bp, Arabidopsis thaliana
ttcggagcaacgtcggc

SEQ ID NO: 162711 - DNA, 17 bp, Arabidopsis thaliana
ttcggagcaggcttcat

SEQ ID NO: 162712 - DNA, 17 bp, Arabidopsis thaliana
ttcggaggatctgcgtc

SEQ ID NO: 162713 - DNA, 17 bp, Arabidopsis thaliana
ttcggagttcttgcaga

SEQ ID NO: 162714 - DNA, 17 bp, Arabidopsis thaliana
ttcggatacgctttgtc

SEQ ID NO: 162715 - DNA, 17 bp, Arabidopsis thaliana
ttcggatacgctttgtt

SEQ ID NO: 162716 - DNA, 17 bp, Arabidopsis thaliana
ttcggatatccgcttcg

SEQ ID NO: 162717 - DNA, 17 bp, Arabidopsis thaliana
ttcggatcaggcttcat

SEQ ID NO: 162718 - DNA, 17 bp, Arabidopsis thaliana
ttcggatcaggtttttc

SEQ ID NO: 162719 - DNA, 17 bp, Arabidopsis thaliana
ttcggatcatatggtac

SEQ ID NO: 162720 - DNA, 17 bp, Arabidopsis thaliana
ttcggatccggcgacgt

SEQ ID NO: 162721 - DNA, 17 bp, Arabidopsis thaliana
ttcggatcctcgataac

SEQ ID NO: 162722 - DNA, 17 bp, Arabidopsis thaliana
ttcggatcctctcggag

SEQ ID NO: 162723 - DNA, 17 bp, Arabidopsis thaliana
ttcggatcctgctgttg

SEQ ID NO: 162724 - DNA, 17 bp, Arabidopsis thaliana
ttcggatcctgctgttt

SEQ ID NO: 162725 - DNA, 17 bp, Arabidopsis thaliana
ttcggatcctggataac

SEQ ID NO: 162726 - DNA, 17 bp, Arabidopsis thaliana
ttcggatcgcggcgacg

SEQ ID NO: 162727 - DNA, 17 bp, Arabidopsis thaliana
ttcggatcggcgacgtg

SEQ ID NO: 162728 - DNA, 17 bp, Arabidopsis thaliana
ttcggatctaatttttc

SEQ ID NO: 162729 - DNA, 17 bp, Arabidopsis thaliana
ttcggatctctcaggcg

SEQ ID NO: 162730 - DNA, 17 bp, Arabidopsis thaliana
ttcggatgaattcaatg

SEQ ID NO: 162731 - DNA, 17 bp, Arabidopsis thaliana
ttcggatgacgtggaga

SEQ ID NO: 162732 - DNA, 17 bp, Arabidopsis thaliana
ttcggatggactctctg

SEQ ID NO: 162733 - DNA, 17 bp, Arabidopsis thaliana
ttcggatggagattctc

SEQ ID NO: 162734 - DNA, 17 bp, Arabidopsis thaliana
ttcggattcgggttaaa

SEQ ID NO: 162735 - DNA, 17 bp, Arabidopsis thaliana
ttcggattcgggttttt

SEQ ID NO: 162736 - DNA, 17 bp, Arabidopsis thaliana
ttcggcaagatattgtg

SEQ ID NO: 162737 - DNA, 17 bp, Arabidopsis thaliana
ttcggcaaggacctggg

SEQ ID NO: 162738 - DNA, 17 bp, Arabidopsis thaliana
ttcggcaggtcagttcc

SEQ ID NO: 162739 - DNA, 17 bp, Arabidopsis thaliana
ttcggccaagaggacgt

SEQ ID NO: 162740 - DNA, 17 bp, Arabidopsis thaliana
ttcggccactgaaacta

SEQ ID NO: 162741 - DNA, 17 bp, Arabidopsis thaliana
ttcggccatttggatga

SEQ ID NO: 162742 - DNA, 17 bp, Arabidopsis thaliana
ttcggcccataacctcc

SEQ ID NO: 162743 - DNA, 17 bp, Arabidopsis thaliana
ttcggcccctctctcta

SEQ ID NO: 162744 - DNA, 17 bp, Arabidopsis thaliana
ttcggccctgggcagca

SEQ ID NO: 162745 - DNA, 17 bp, Arabidopsis thaliana
ttcggccctttgtcgct

SEQ ID NO: 162746 - DNA, 17 bp, Arabidopsis thaliana
ttcggcctgtccatatc

SEQ ID NO: 162747 - DNA, 17 bp, Arabidopsis thaliana
ttcggcgacttttccgg

SEQ ID NO: 162748 - DNA, 17 bp, Arabidopsis thaliana
ttcggcgagatattgtg

SEQ ID NO: 162749 - DNA, 17 bp, Arabidopsis thaliana
ttcggcgcaaagaagca

SEQ ID NO: 162750 - DNA, 17 bp, Arabidopsis thaliana
ttcggcggaagcgtcat

SEQ ID NO: 162751 - DNA, 17 bp, Arabidopsis thaliana
ttcggcggaagcgtcgt

SEQ ID NO: 162752 - DNA, 17 bp, Arabidopsis thaliana
ttcggcgggacgagttt

SEQ ID NO: 162753 - DNA, 17 bp, Arabidopsis thaliana
ttcggcgtcggcggagg

SEQ ID NO: 162754 - DNA, 17 bp, Arabidopsis thaliana
ttcggcgttcgaattgt

SEQ ID NO: 162755 - DNA, 17 bp, Arabidopsis thaliana
ttcggcgttgtagactt

SEQ ID NO: 162756 - DNA, 17 bp, Arabidopsis thaliana
ttcggctcccggtagga

SEQ ID NO: 162757 - DNA, 17 bp, Arabidopsis thaliana
ttcggctgaactaaatt

SEQ ID NO: 162758 - DNA, 17 bp, Arabidopsis thaliana
ttcggctgattccgtta

SEQ ID NO: 162759 - DNA, 17 bp, Arabidopsis thaliana
ttcggctgtcttttggt

SEQ ID NO: 162760 - DNA, 17 bp, Arabidopsis thaliana
ttcggcttggttcacac

SEQ ID NO: 162761 - DNA, 17 bp, Arabidopsis thaliana
ttcgggaaaaggattgg

SEQ ID NO: 162762 - DNA, 17 bp, Arabidopsis thaliana
ttcgggaaatggttcag

SEQ ID NO: 162763 - DNA, 17 bp, Arabidopsis thaliana
ttcgggaacgcggacac

SEQ ID NO: 162764 - DNA, 17 bp, Arabidopsis thaliana
ttcgggaatactgtctc

SEQ ID NO: 162765 - DNA, 17 bp, Arabidopsis thaliana
ttcgggacaaggggtgc

SEQ ID NO: 162766 - DNA, 17 bp, Arabidopsis thaliana
ttcgggagaaggggtgc

SEQ ID NO: 162767 - DNA, 17 bp, Arabidopsis thaliana
ttcgggagacatggtcc

SEQ ID NO: 162768 - DNA, 17 bp, Arabidopsis thaliana
ttcgggagactgccgtg

SEQ ID NO: 162769 - DNA, 17 bp, Arabidopsis thaliana
ttcgggatgatcgccgg

SEQ ID NO: 162770 - DNA, 17 bp, Arabidopsis thaliana
ttcgggcagactttact

SEQ ID NO: 162771 - DNA, 17 bp, Arabidopsis thaliana
ttcgggcaggctttgtt

SEQ ID NO: 162772 - DNA, 17 bp, Arabidopsis thaliana
ttcgggcatattcgtga

SEQ ID NO: 162773 - DNA, 17 bp, Arabidopsis thaliana
ttcgggcatttacgtga

SEQ ID NO: 162774 - DNA, 17 bp, Arabidopsis thaliana
ttcgggcattttcgtga

SEQ ID NO: 162775 - DNA, 17 bp, Arabidopsis thaliana
ttcgggcatttttgtga

SEQ ID NO: 162776 - DNA, 17 bp, Arabidopsis thaliana
ttcgggccacttcacct

SEQ ID NO: 162777 - DNA, 17 bp, Arabidopsis thaliana
ttcgggccaggcttcat

SEQ ID NO: 162778 - DNA, 17 bp, Arabidopsis thaliana
ttcgggccagtccgcta

SEQ ID NO: 162779 - DNA, 17 bp, Arabidopsis thaliana
ttcgggccccgccggga

SEQ ID NO: 162780 - DNA, 17 bp, Arabidopsis thaliana
ttcgggcctaaggggat

SEQ ID NO: 162781 - DNA, 17 bp, Arabidopsis thaliana
ttcgggcctaggggaga

SEQ ID NO: 162782 - DNA, 17 bp, Arabidopsis thaliana
ttcgggcctggaaagat

SEQ ID NO: 162783 - DNA, 17 bp, Arabidopsis thaliana
ttcgggcctggaggatt

SEQ ID NO: 162784 - DNA, 17 bp, Arabidopsis thaliana
ttcgggcctggagggat

SEQ ID NO: 162785 - DNA, 17 bp, Arabidopsis thaliana
ttcgggcctgggggatt

SEQ ID NO: 162786 - DNA, 17 bp, Arabidopsis thaliana
ttcgggccttttcgcga

SEQ ID NO: 162787 - DNA, 17 bp, Arabidopsis thaliana
ttcgggccttttcgtaa

SEQ ID NO: 162788 - DNA, 17 bp, Arabidopsis thaliana
ttcgggccttttcgtga

SEQ ID NO: 162789 - DNA, 17 bp, Arabidopsis thaliana
ttcgggctctatctggc

SEQ ID NO: 162790 - DNA, 17 bp, Arabidopsis thaliana
ttcgggctctctctggc

SEQ ID NO: 162791 - DNA, 17 bp, Arabidopsis thaliana
ttcgggctgagggtgaa

SEQ ID NO: 162792 - DNA, 17 bp, Arabidopsis thaliana
ttcgggctttacccact

SEQ ID NO: 162793 - DNA, 17 bp, Arabidopsis thaliana
ttcgggcttttgcgatc

SEQ ID NO: 162794 - DNA, 17 bp, Arabidopsis thaliana
ttcggggattacgagtt

SEQ ID NO: 162795 - DNA, 17 bp, Arabidopsis thaliana
ttcggggccatactcgg

SEQ ID NO: 162796 - DNA, 17 bp, Arabidopsis thaliana
ttcggggccgagaccct

SEQ ID NO: 162797 - DNA, 17 bp, Arabidopsis thaliana
ttcggggcgtggaccga

SEQ ID NO: 162798 - DNA, 17 bp, Arabidopsis thaliana
ttcggggcgtggacgga

SEQ ID NO: 162799 - DNA, 17 bp, Arabidopsis thaliana
ttcgggggcgtaggcgg

SEQ ID NO: 162800 - DNA, 17 bp, Arabidopsis thaliana
ttcggggtgttgtttga

SEQ ID NO: 162801 - DNA, 17 bp, Arabidopsis thaliana
ttcgggtacggagagat

SEQ ID NO: 162802 - DNA, 17 bp, Arabidopsis thaliana
ttcgggtatccaagctt

SEQ ID NO: 162803 - DNA, 17 bp, Arabidopsis thaliana
ttcgggtattcgggtca

SEQ ID NO: 162804 - DNA, 17 bp, Arabidopsis thaliana
ttcgggtcataacggag

SEQ ID NO: 162805 - DNA, 17 bp, Arabidopsis thaliana
ttcgggtcccaccgggc

SEQ ID NO: 162806 - DNA, 17 bp, Arabidopsis thaliana
ttcgggtcccaccgggt

SEQ ID NO: 162807 - DNA, 17 bp, Arabidopsis thaliana
ttcgggtcccaccgtgg

SEQ ID NO: 162808 - DNA, 17 bp, Arabidopsis thaliana
ttcgggtcccggcaacg

SEQ ID NO: 162809 - DNA, 17 bp, Arabidopsis thaliana
ttcgggtcccggcgacg

SEQ ID NO: 162810 - DNA, 17 bp, Arabidopsis thaliana
ttcgggtcggatccagt

SEQ ID NO: 162811 - DNA, 17 bp, Arabidopsis thaliana
ttcgggtcgggatcggt

SEQ ID NO: 162812 - DNA, 17 bp, Arabidopsis thaliana
ttcgggtcgggtcggtt

SEQ ID NO: 162813 - DNA, 17 bp, Arabidopsis thaliana
ttcgggtctaatttttc

SEQ ID NO: 162814 - DNA, 17 bp, Arabidopsis thaliana
ttcgggtctggagggat

SEQ ID NO: 162815 - DNA, 17 bp, Arabidopsis thaliana
ttcgggtctgggggatt

SEQ ID NO: 162816 - DNA, 17 bp, Arabidopsis thaliana
ttcgggtctgggtggat

SEQ ID NO: 162817 - DNA, 17 bp, Arabidopsis thaliana
ttcgggtgcgtggttca

SEQ ID NO: 162818 - DNA, 17 bp, Arabidopsis thaliana
ttcgggttcaggttcgc

SEQ ID NO: 162819 - DNA, 17 bp, Arabidopsis thaliana
ttcgggtttcgaaattt

SEQ ID NO: 162820 - DNA, 17 bp, Arabidopsis thaliana
ttcggtaataccctgct

SEQ ID NO: 162821 - DNA, 17 bp, Arabidopsis thaliana
ttcggtacggattttcc

SEQ ID NO: 162822 - DNA, 17 bp, Arabidopsis thaliana
ttcggtattgccgcact

SEQ ID NO: 162823 - DNA, 17 bp, Arabidopsis thaliana
ttcggtcaatccttact

SEQ ID NO: 162824 - DNA, 17 bp, Arabidopsis thaliana
ttcggtcagcgtcgact

SEQ ID NO: 162825 - DNA, 17 bp, Arabidopsis thaliana
ttcggtccacgcttacc

SEQ ID NO: 162826 - DNA, 17 bp, Arabidopsis thaliana
ttcggtccatatccggt

SEQ ID NO: 162827 - DNA, 17 bp, Arabidopsis thaliana
ttcggtccccaccgagc

SEQ ID NO: 162828 - DNA, 17 bp, Arabidopsis thaliana
ttcggtccccagtggag

SEQ ID NO: 162829 - DNA, 17 bp, Arabidopsis thaliana
ttcggtccccggcaacg

SEQ ID NO: 162830 - DNA, 17 bp, Arabidopsis thaliana
ttcggtccctgtatagg

SEQ ID NO: 162831 - DNA, 17 bp, Arabidopsis thaliana
ttcggtcctgcgtgtgg

SEQ ID NO: 162832 - DNA, 17 bp, Arabidopsis thaliana
ttcggtcctgggcagca

SEQ ID NO: 162833 - DNA, 17 bp, Arabidopsis thaliana
ttcggtcgcaggatcat

SEQ ID NO: 162834 - DNA, 17 bp, Arabidopsis thaliana
ttcggtcggcgatacgc

SEQ ID NO: 162835 - DNA, 17 bp, Arabidopsis thaliana
ttcggtcgggtccagtc

SEQ ID NO: 162836 - DNA, 17 bp, Arabidopsis thaliana
ttcggtcggtttagaaa

SEQ ID NO: 162837 - DNA, 17 bp, Arabidopsis thaliana
ttcggtctcatcttgaa

SEQ ID NO: 162838 - DNA, 17 bp, Arabidopsis thaliana
ttcggtgaagatgtcag

SEQ ID NO: 162839 - DNA, 17 bp, Arabidopsis thaliana
ttcggtgatatctccga

SEQ ID NO: 162840 - DNA, 17 bp, Arabidopsis thaliana
ttcggtgccgtcttagc

SEQ ID NO: 162841 - DNA, 17 bp, Arabidopsis thaliana
ttcggtgcggtggtgcc

SEQ ID NO: 162842 - DNA, 17 bp, Arabidopsis thaliana
ttcggtggcattcagat

SEQ ID NO: 162843 - DNA, 17 bp, Arabidopsis thaliana
ttcggtgggtattgcca

SEQ ID NO: 162844 - DNA, 17 bp, Arabidopsis thaliana
ttcggttagtcgcattg

SEQ ID NO: 162845 - DNA, 17 bp, Arabidopsis thaliana
ttcggttatttggattg

SEQ ID NO: 162846 - DNA, 17 bp, Arabidopsis thaliana
ttcggttcagattcggg

SEQ ID NO: 162847 - DNA, 17 bp, Arabidopsis thaliana
ttcggttccagtcgggt

SEQ ID NO: 162848 - DNA, 17 bp, Arabidopsis thaliana
ttcggttccccgcacct

SEQ ID NO: 162849 - DNA, 17 bp, Arabidopsis thaliana
ttcggttcccggcatcg

SEQ ID NO: 162850 - DNA, 17 bp, Arabidopsis thaliana
ttcggttcccggctgct

SEQ ID NO: 162851 - DNA, 17 bp, Arabidopsis thaliana
ttcggttcccggctggt

SEQ ID NO: 162852 - DNA, 17 bp, Arabidopsis thaliana
ttcggttccggcagccc

SEQ ID NO: 162853 - DNA, 17 bp, Arabidopsis thaliana
ttcggttcctcggatcg

SEQ ID NO: 162854 - DNA, 17 bp, Arabidopsis thaliana
ttcggttcgattcttcg

SEQ ID NO: 162855 - DNA, 17 bp, Arabidopsis thaliana
ttcggttcggagcggtt

SEQ ID NO: 162856 - DNA, 17 bp, Arabidopsis thaliana
ttcggttcgtatcggat

SEQ ID NO: 162857 - DNA, 17 bp, Arabidopsis thaliana
ttcggttctctggattc

SEQ ID NO: 162858 - DNA, 17 bp, Arabidopsis thaliana
ttcggttctggaggatt

SEQ ID NO: 162859 - DNA, 17 bp, Arabidopsis thaliana
ttcggttctgtctttga

SEQ ID NO: 162860 - DNA, 17 bp, Arabidopsis thaliana
ttcggttcttcactacg

SEQ ID NO: 162861 - DNA, 17 bp, Arabidopsis thaliana
ttcggttgctctcttgt

SEQ ID NO: 162862 - DNA, 17 bp, Arabidopsis thaliana
ttcggttgtaccactgg

SEQ ID NO: 162863 - DNA, 17 bp, Arabidopsis thaliana
ttcggttgtaccgctgg

SEQ ID NO: 162864 - DNA, 17 bp, Arabidopsis thaliana
ttcggttgtgtctttga

SEQ ID NO: 162865 - DNA, 17 bp, Arabidopsis thaliana
ttcggtttcgattcggg

SEQ ID NO: 162866 - DNA, 17 bp, Arabidopsis thaliana
ttcggtttggagtgaat

SEQ ID NO: 162867 - DNA, 17 bp, Arabidopsis thaliana
ttcggttttaccgctgg

SEQ ID NO: 162868 - DNA, 17 bp, Arabidopsis thaliana
ttcgtaaatctcggctg

SEQ ID NO: 162869 - DNA, 17 bp, Arabidopsis thaliana
ttcgtaacctgcatggg

SEQ ID NO: 162870 - DNA, 17 bp, Arabidopsis thaliana
ttcgtaagactgcttcc

SEQ ID NO: 162871 - DNA, 17 bp, Arabidopsis thaliana
ttcgtaatgcggatcct

SEQ ID NO: 162872 - DNA, 17 bp, Arabidopsis thaliana
ttcgtacccggacgaag

SEQ ID NO: 162873 - DNA, 17 bp, Arabidopsis thaliana
ttcgtacccgggcgaag

SEQ ID NO: 162874 - DNA, 17 bp, Arabidopsis thaliana
ttcgtacccgggcgcag

SEQ ID NO: 162875 - DNA, 17 bp, Arabidopsis thaliana
ttcgtacccgggctcac

SEQ ID NO: 162876 - DNA, 17 bp, Arabidopsis thaliana
ttcgtacccgggctcag

SEQ ID NO: 162877 - DNA, 17 bp, Arabidopsis thaliana
ttcgtacccgggctcat

SEQ ID NO: 162878 - DNA, 17 bp, Arabidopsis thaliana
ttcgtaccctccttcta

SEQ ID NO: 162879 - DNA, 17 bp, Arabidopsis thaliana
ttcgtaccttgactgaa

SEQ ID NO: 162880 - DNA, 17 bp, Arabidopsis thaliana
ttcgtaccttgactgat

SEQ ID NO: 162881 - DNA, 17 bp, Arabidopsis thaliana
ttcgtacgaggcaggtt

SEQ ID NO: 162882 - DNA, 17 bp, Arabidopsis thaliana
ttcgtactctgattctc

SEQ ID NO: 162883 - DNA, 17 bp, Arabidopsis thaliana
ttcgtagagcacttgaa

SEQ ID NO: 162884 - DNA, 17 bp, Arabidopsis thaliana
ttcgtagccaggttcga

SEQ ID NO: 162885 - DNA, 17 bp, Arabidopsis thaliana
ttcgtagccgcaagact

SEQ ID NO: 162886 - DNA, 17 bp, Arabidopsis thaliana
ttcgtaggttactgtgc

SEQ ID NO: 162887 - DNA, 17 bp, Arabidopsis thaliana
ttcgtatccggttgggc

SEQ ID NO: 162888 - DNA, 17 bp, Arabidopsis thaliana
ttcgtatctctcaggtg

SEQ ID NO: 162889 - DNA, 17 bp, Arabidopsis thaliana
ttcgtatgtggccgttt

SEQ ID NO: 162890 - DNA, 17 bp, Arabidopsis thaliana
ttcgtcaacttcgtatg

SEQ ID NO: 162891 - DNA, 17 bp, Arabidopsis thaliana
ttcgtcaatgtccgcca

SEQ ID NO: 162892 - DNA, 17 bp, Arabidopsis thaliana
ttcgtcaccaatgtttt

SEQ ID NO: 162893 - DNA, 17 bp, Arabidopsis thaliana
ttcgtcaccgtgacaga

SEQ ID NO: 162894 - DNA, 17 bp, Arabidopsis thaliana
ttcgtcagggcattttg

SEQ ID NO: 162895 - DNA, 17 bp, Arabidopsis thaliana
ttcgtcatccacctcca

SEQ ID NO: 162896 - DNA, 17 bp, Arabidopsis thaliana
ttcgtccaaatcgcatt

SEQ ID NO: 162897 - DNA, 17 bp, Arabidopsis thaliana
ttcgtccaaggtcagcc

SEQ ID NO: 162898 - DNA, 17 bp, Arabidopsis thaliana
ttcgtccacggagggtg

SEQ ID NO: 162899 - DNA, 17 bp, Arabidopsis thaliana
ttcgtcccaccgggtgt

SEQ ID NO: 162900 - DNA, 17 bp, Arabidopsis thaliana
ttcgtcccactgggtgt

SEQ ID NO: 162901 - DNA, 17 bp, Arabidopsis thaliana
ttcgtcccctctctcta

SEQ ID NO: 162902 - DNA, 17 bp, Arabidopsis thaliana
ttcgtccgcttgggccg

SEQ ID NO: 162903 - DNA, 17 bp, Arabidopsis thaliana
ttcgtccggtgcgcccc

SEQ ID NO: 162904 - DNA, 17 bp, Arabidopsis thaliana
ttcgtccgtcggctttg

SEQ ID NO: 162905 - DNA, 17 bp, Arabidopsis thaliana
ttcgtcgacactcgatc

SEQ ID NO: 162906 - DNA, 17 bp, Arabidopsis thaliana
ttcgtcgacttagatgg

SEQ ID NO: 162907 - DNA, 17 bp, Arabidopsis thaliana
ttcgtcgagcgctgaag

SEQ ID NO: 162908 - DNA, 17 bp, Arabidopsis thaliana
ttcgtcgcaggtgtggt

SEQ ID NO: 162909 - DNA, 17 bp, Arabidopsis thaliana
ttcgtcgcatcctgtag

SEQ ID NO: 162910 - DNA, 17 bp, Arabidopsis thaliana
ttcgtcgcctctgtatt

SEQ ID NO: 162911 - DNA, 17 bp, Arabidopsis thaliana
ttcgtcgccttcagttg

SEQ ID NO: 162912 - DNA, 17 bp, Arabidopsis thaliana
ttcgtcgcttgaagttg

SEQ ID NO: 162913 - DNA, 17 bp, Arabidopsis thaliana
ttcgtcggaggactgtc

SEQ ID NO: 162914 - DNA, 17 bp, Arabidopsis thaliana
ttcgtcggagggcgctc

SEQ ID NO: 162915 - DNA, 17 bp, Arabidopsis thaliana
ttcgtcggagggctatc

SEQ ID NO: 162916 - DNA, 17 bp, Arabidopsis thaliana
ttcgtcggagggctgtc

SEQ ID NO: 162917 - DNA, 17 bp, Arabidopsis thaliana
ttcgtcggagggctgtt

SEQ ID NO: 162918 - DNA, 17 bp, Arabidopsis thaliana
ttcgtcggcgaagaggt

SEQ ID NO: 162919 - DNA, 17 bp, Arabidopsis thaliana
ttcgtcggcgaatttga

SEQ ID NO: 162920 - DNA, 17 bp, Arabidopsis thaliana
ttcgtcgggaagagact

SEQ ID NO: 162921 - DNA, 17 bp, Arabidopsis thaliana
ttcgtcgtaaccgttct

SEQ ID NO: 162922 - DNA, 17 bp, Arabidopsis thaliana
ttcgtcgtctttcctgg

SEQ ID NO: 162923 - DNA, 17 bp, Arabidopsis thaliana
ttcgtcgttagctttat

SEQ ID NO: 162924 - DNA, 17 bp, Arabidopsis thaliana
ttcgtcgtttaccgctt

SEQ ID NO: 162925 - DNA, 17 bp, Arabidopsis thaliana
ttcgtctaactcgttgt

SEQ ID NO: 162926 - DNA, 17 bp, Arabidopsis thaliana
ttcgtctactctcttag

SEQ ID NO: 162927 - DNA, 17 bp, Arabidopsis thaliana
ttcgtctcaaagattaa

SEQ ID NO: 162928 - DNA, 17 bp, Arabidopsis thaliana
ttcgtctcacgtgttgc

SEQ ID NO: 162929 - DNA, 17 bp, Arabidopsis thaliana
ttcgtctcccggcagac

SEQ ID NO: 162930 - DNA, 17 bp, Arabidopsis thaliana
ttcgtctcccggtagga

SEQ ID NO: 162931 - DNA, 17 bp, Arabidopsis thaliana
ttcgtctgattcagatc

SEQ ID NO: 162932 - DNA, 17 bp, Arabidopsis thaliana
ttcgtctgcctgggtgt

SEQ ID NO: 162933 - DNA, 17 bp, Arabidopsis thaliana
ttcgtctgttgctatgg

SEQ ID NO: 162934 - DNA, 17 bp, Arabidopsis thaliana
ttcgtcttagctcagcg

SEQ ID NO: 162935 - DNA, 17 bp, Arabidopsis thaliana
ttcgtcttaggctatct

SEQ ID NO: 162936 - DNA, 17 bp, Arabidopsis thaliana
ttcgtcttcacgggtta

SEQ ID NO: 162937 - DNA, 17 bp, Arabidopsis thaliana
ttcgtcttcttcacggg

SEQ ID NO: 162938 - DNA, 17 bp, Arabidopsis thaliana
ttcgtcttcttctacat

SEQ ID NO: 162939 - DNA, 17 bp, Arabidopsis thaliana
ttcgtcttgtccaaccg

SEQ ID NO: 162940 - DNA, 17 bp, Arabidopsis thaliana
ttcgtgaaatttgggtc

SEQ ID NO: 162941 - DNA, 17 bp, Arabidopsis thaliana
ttcgtgaaccaactggg

SEQ ID NO: 162942 - DNA, 17 bp, Arabidopsis thaliana
ttcgtgacaacaacgat

SEQ ID NO: 162943 - DNA, 17 bp, Arabidopsis thaliana
ttcgtgaccttgctttg

SEQ ID NO: 162944 - DNA, 17 bp, Arabidopsis thaliana
ttcgtgactttgagtgg

SEQ ID NO: 162945 - DNA, 17 bp, Arabidopsis thaliana
ttcgtgatcttctctca

SEQ ID NO: 162946 - DNA, 17 bp, Arabidopsis thaliana
ttcgtgattgagatggt

SEQ ID NO: 162947 - DNA, 17 bp, Arabidopsis thaliana
ttcgtgatttgcgctat

SEQ ID NO: 162948 - DNA, 17 bp, Arabidopsis thaliana
ttcgtgcaccgtcgaca

SEQ ID NO: 162949 - DNA, 17 bp, Arabidopsis thaliana
ttcgtgcaccgtcgata

SEQ ID NO: 162950 - DNA, 17 bp, Arabidopsis thaliana
ttcgtgcattggtcggc

SEQ ID NO: 162951 - DNA, 17 bp, Arabidopsis thaliana
ttcgtgcccaaacctag

SEQ ID NO: 162952 - DNA, 17 bp, Arabidopsis thaliana
ttcgtgccccgccggaa

SEQ ID NO: 162953 - DNA, 17 bp, Arabidopsis thaliana
ttcgtgctggtttgtgc

SEQ ID NO: 162954 - DNA, 17 bp, Arabidopsis thaliana
ttcgtggaacgccaagt

SEQ ID NO: 162955 - DNA, 17 bp, Arabidopsis thaliana
ttcgtggaattgacctg

SEQ ID NO: 162956 - DNA, 17 bp, Arabidopsis thaliana
ttcgtggacatgtagac

SEQ ID NO: 162957 - DNA, 17 bp, Arabidopsis thaliana
ttcgtggacttgtttga

SEQ ID NO: 162958 - DNA, 17 bp, Arabidopsis thaliana
ttcgtggagcgattttc

SEQ ID NO: 162959 - DNA, 17 bp, Arabidopsis thaliana
ttcgtggattcggaatc

SEQ ID NO: 162960 - DNA, 17 bp, Arabidopsis thaliana
ttcgtggatttgacttg

SEQ ID NO: 162961 - DNA, 17 bp, Arabidopsis thaliana
ttcgtggcaatattgct

SEQ ID NO: 162962 - DNA, 17 bp, Arabidopsis thaliana
ttcgtggcagaccagtg

SEQ ID NO: 162963 - DNA, 17 bp, Arabidopsis thaliana
ttcgtggcagatcattt

SEQ ID NO: 162964 - DNA, 17 bp, Arabidopsis thaliana
ttcgtggcggtcggagt

SEQ ID NO: 162965 - DNA, 17 bp, Arabidopsis thaliana
ttcgtggctcaacttag

SEQ ID NO: 162966 - DNA, 17 bp, Arabidopsis thaliana
ttcgtggtccaggtcgt

SEQ ID NO: 162967 - DNA, 17 bp, Arabidopsis thaliana
ttcgtgtaggaaaatgg

SEQ ID NO: 162968 - DNA, 17 bp, Arabidopsis thaliana
ttcgtgtccaaccgcat

SEQ ID NO: 162969 - DNA, 17 bp, Arabidopsis thaliana
ttcgtgtcccaccgggc

SEQ ID NO: 162970 - DNA, 17 bp, Arabidopsis thaliana
ttcgtgtcccaccgggt

SEQ ID NO: 162971 - DNA, 17 bp, Arabidopsis thaliana
ttcgtgtcccactgggt

SEQ ID NO: 162972 - DNA, 17 bp, Arabidopsis thaliana
ttcgtgtgaattttgtg

SEQ ID NO: 162973 - DNA, 17 bp, Arabidopsis thaliana
ttcgtgttcaaccgcat

SEQ ID NO: 162974 - DNA, 17 bp, Arabidopsis thaliana
ttcgtgttgtcgatttc

SEQ ID NO: 162975 - DNA, 17 bp, Arabidopsis thaliana
ttcgttaaagtcttaca

SEQ ID NO: 162976 - DNA, 17 bp, Arabidopsis thaliana
ttcgttaacgcagatgt

SEQ ID NO: 162977 - DNA, 17 bp, Arabidopsis thaliana
ttcgttactctgcaggg

SEQ ID NO: 162978 - DNA, 17 bp, Arabidopsis thaliana
ttcgttagccggtcgga

SEQ ID NO: 162979 - DNA, 17 bp, Arabidopsis thaliana
ttcgttagtgactgctc

SEQ ID NO: 162980 - DNA, 17 bp, Arabidopsis thaliana
ttcgttattgtcaacgg

SEQ ID NO: 162981 - DNA, 17 bp, Arabidopsis thaliana
ttcgttcaggcgtgggt

SEQ ID NO: 162982 - DNA, 17 bp, Arabidopsis thaliana
ttcgttccacgctcacc

SEQ ID NO: 162983 - DNA, 17 bp, Arabidopsis thaliana
ttcgttccacgctcact

SEQ ID NO: 162984 - DNA, 17 bp, Arabidopsis thaliana
ttcgttccatgtcaatc

SEQ ID NO: 162985 - DNA, 17 bp, Arabidopsis thaliana
ttcgttccccacagaca

SEQ ID NO: 162986 - DNA, 17 bp, Arabidopsis thaliana
ttcgttccccagcagag

SEQ ID NO: 162987 - DNA, 17 bp, Arabidopsis thaliana
ttcgttcccccgcatct

SEQ ID NO: 162988 - DNA, 17 bp, Arabidopsis thaliana
ttcgttccccggcaacg

SEQ ID NO: 162989 - DNA, 17 bp, Arabidopsis thaliana
ttcgttccccggctggt

SEQ ID NO: 162990 - DNA, 17 bp, Arabidopsis thaliana
ttcgttcccggcaggtt

SEQ ID NO: 162991 - DNA, 17 bp, Arabidopsis thaliana
ttcgttccctgtatagg

SEQ ID NO: 162992 - DNA, 17 bp, Arabidopsis thaliana
ttcgttcctcgccgggg

SEQ ID NO: 162993 - DNA, 17 bp, Arabidopsis thaliana
ttcgttcctgcgtgagg

SEQ ID NO: 162994 - DNA, 17 bp, Arabidopsis thaliana
ttcgttcctgcgtgtga

SEQ ID NO: 162995 - DNA, 17 bp, Arabidopsis thaliana
ttcgttcctgcgtgtgg

SEQ ID NO: 162996 - DNA, 17 bp, Arabidopsis thaliana
ttcgttcctgggcacca

SEQ ID NO: 162997 - DNA, 17 bp, Arabidopsis thaliana
ttcgttcctgggcagaa

SEQ ID NO: 162998 - DNA, 17 bp, Arabidopsis thaliana
ttcgttcctgggcagca

SEQ ID NO: 162999 - DNA, 17 bp, Arabidopsis thaliana
ttcgttccttcgttcag

SEQ ID NO: 163000 - DNA, 17 bp, Arabidopsis thaliana
ttcgttcgcttgcagag

SEQ ID NO: 163001 - DNA, 17 bp, Arabidopsis thaliana
ttcgttcggagatgagt

SEQ ID NO: 163002 - DNA, 17 bp, Arabidopsis thaliana
ttcgttcggcacgtcca

SEQ ID NO: 163003 - DNA, 17 bp, Arabidopsis thaliana
ttcgttcgtcggctttg

SEQ ID NO: 163004 - DNA, 17 bp, Arabidopsis thaliana
ttcgttcgtgtccgccg

SEQ ID NO: 163005 - DNA, 17 bp, Arabidopsis thaliana
ttcgttcgtgttggtcc

SEQ ID NO: 163006 - DNA, 17 bp, Arabidopsis thaliana
ttcgttcgtttcccggc

SEQ ID NO: 163007 - DNA, 17 bp, Arabidopsis thaliana
ttcgttctccggcaacg

SEQ ID NO: 163008 - DNA, 17 bp, Arabidopsis thaliana
ttcgttctgatgtgcac

SEQ ID NO: 163009 - DNA, 17 bp, Arabidopsis thaliana
ttcgttgactggcccgt

SEQ ID NO: 163010 - DNA, 17 bp, Arabidopsis thaliana
ttcgttgacttgaccat

SEQ ID NO: 163011 - DNA, 17 bp, Arabidopsis thaliana
ttcgttgacttggccat

SEQ ID NO: 163012 - DNA, 17 bp, Arabidopsis thaliana
ttcgttgactttgctat

SEQ ID NO: 163013 - DNA, 17 bp, Arabidopsis thaliana
ttcgttgagagtgtgca

SEQ ID NO: 163014 - DNA, 17 bp, Arabidopsis thaliana
ttcgttgccgtcgccca

SEQ ID NO: 163015 - DNA, 17 bp, Arabidopsis thaliana
ttcgttgcctgttcgac

SEQ ID NO: 163016 - DNA, 17 bp, Arabidopsis thaliana
ttcgttggaccgtttcc

SEQ ID NO: 163017 - DNA, 17 bp, Arabidopsis thaliana
ttcgttggcagtagacc

SEQ ID NO: 163018 - DNA, 17 bp, Arabidopsis thaliana
ttcgttgggctcagaag

SEQ ID NO: 163019 - DNA, 17 bp, Arabidopsis thaliana
ttcgttggtcacaacga

SEQ ID NO: 163020 - DNA, 17 bp, Arabidopsis thaliana
ttcgttggtctaaatag

SEQ ID NO: 163021 - DNA, 17 bp, Arabidopsis thaliana
ttcgttggtgcaggtcg

SEQ ID NO: 163022 - DNA, 17 bp, Arabidopsis thaliana
ttcgttgtagtctagct

SEQ ID NO: 163023 - DNA, 17 bp, Arabidopsis thaliana
ttcgttgtccgttcgac

SEQ ID NO: 163024 - DNA, 17 bp, Arabidopsis thaliana
ttcgttgtctgtacgac

SEQ ID NO: 163025 - DNA, 17 bp, Arabidopsis thaliana
ttcgttgtctgttccac

SEQ ID NO: 163026 - DNA, 17 bp, Arabidopsis thaliana
ttcgttgtctgttcgac

SEQ ID NO: 163027 - DNA, 17 bp, Arabidopsis thaliana
ttcgttgtctgttcgag

SEQ ID NO: 163028 - DNA, 17 bp, Arabidopsis thaliana
ttcgttgtctgttcgtc

SEQ ID NO: 163029 - DNA, 17 bp, Arabidopsis thaliana
ttcgttgtctgtttgtc

SEQ ID NO: 163030 - DNA, 17 bp, Arabidopsis thaliana
ttcgttgtgtggatttt

SEQ ID NO: 163031 - DNA, 17 bp, Arabidopsis thaliana
ttcgttgtgtgttcgac

SEQ ID NO: 163032 - DNA, 17 bp, Arabidopsis thaliana
ttcgttgttttgtggac

SEQ ID NO: 163033 - DNA, 17 bp, Arabidopsis thaliana
ttcgtttagtcttcggg

SEQ ID NO: 163034 - DNA, 17 bp, Arabidopsis thaliana
ttcgtttatctgtcgct

SEQ ID NO: 163035 - DNA, 17 bp, Arabidopsis thaliana
ttcgtttattaatcgtc

SEQ ID NO: 163036 - DNA, 17 bp, Arabidopsis thaliana
ttcgtttcacgtcgggt

SEQ ID NO: 163037 - DNA, 17 bp, Arabidopsis thaliana
ttcgtttccccgcacct

SEQ ID NO: 163038 - DNA, 17 bp, Arabidopsis thaliana
ttcgtttccccgcacgc

SEQ ID NO: 163039 - DNA, 17 bp, Arabidopsis thaliana
ttcgtttcccggaatcc

SEQ ID NO: 163040 - DNA, 17 bp, Arabidopsis thaliana
ttcgtttcccggcaacg

SEQ ID NO: 163041 - DNA, 17 bp, Arabidopsis thaliana
ttcgtttcccggcatct

SEQ ID NO: 163042 - DNA, 17 bp, Arabidopsis thaliana
ttcgtttcccggccggt

SEQ ID NO: 163043 - DNA, 17 bp, Arabidopsis thaliana
ttcgtttcccggctggc

SEQ ID NO: 163044 - DNA, 17 bp, Arabidopsis thaliana
ttcgtttcccggctggt

SEQ ID NO: 163045 - DNA, 17 bp, Arabidopsis thaliana
ttcgtttcccggcttgt

SEQ ID NO: 163046 - DNA, 17 bp, Arabidopsis thaliana
ttcgtttcccgtctggt

SEQ ID NO: 163047 - DNA, 17 bp, Arabidopsis thaliana
ttcgtttccgccagccc

SEQ ID NO: 163048 - DNA, 17 bp, Arabidopsis thaliana
ttcgtttccggcaggcc

SEQ ID NO: 163049 - DNA, 17 bp, Arabidopsis thaliana
ttcgtttccggcagggc

SEQ ID NO: 163050 - DNA, 17 bp, Arabidopsis thaliana
ttcgtttccggcaggtc

SEQ ID NO: 163051 - DNA, 17 bp, Arabidopsis thaliana
ttcgtttccggctggtg

SEQ ID NO: 163052 - DNA, 17 bp, Arabidopsis thaliana
ttcgtttctcggaacac

SEQ ID NO: 163053 - DNA, 17 bp, Arabidopsis thaliana
ttcgtttctcggaacgc

SEQ ID NO: 163054 - DNA, 17 bp, Arabidopsis thaliana
ttcgtttctcggaatgc

SEQ ID NO: 163055 - DNA, 17 bp, Arabidopsis thaliana
ttcgtttctcggctggt

SEQ ID NO: 163056 - DNA, 17 bp, Arabidopsis thaliana
ttcgtttgcatgtcgct

SEQ ID NO: 163057 - DNA, 17 bp, Arabidopsis thaliana
ttcgtttgctcatttgg

SEQ ID NO: 163058 - DNA, 17 bp, Arabidopsis thaliana
ttcgtttgcttgtcgct

SEQ ID NO: 163059 - DNA, 17 bp, Arabidopsis thaliana
ttcgtttgcttgttgcc

SEQ ID NO: 163060 - DNA, 17 bp, Arabidopsis thaliana
ttcgtttggaccgcagt

SEQ ID NO: 163061 - DNA, 17 bp, Arabidopsis thaliana
ttcgtttggttggagct

SEQ ID NO: 163062 - DNA, 17 bp, Arabidopsis thaliana
ttcgtttgtcgtgcttt

SEQ ID NO: 163063 - DNA, 17 bp, Arabidopsis thaliana
ttcgtttgtctgtcgct

SEQ ID NO: 163064 - DNA, 17 bp, Arabidopsis thaliana
ttcgttttatgacgaag

SEQ ID NO: 163065 - DNA, 17 bp, Arabidopsis thaliana
ttcgttttccggcatcg

SEQ ID NO: 163066 - DNA, 17 bp, Arabidopsis thaliana
ttcgttttcctgtcgct

SEQ ID NO: 163067 - DNA, 17 bp, Arabidopsis thaliana
ttcgttttgtgtgtcta

SEQ ID NO: 163068 - DNA, 17 bp, Arabidopsis thaliana
ttctaaaagcggtcgaa

SEQ ID NO: 163069 - DNA, 17 bp, Arabidopsis thaliana
ttctaaaccgaccgagc

SEQ ID NO: 163070 - DNA, 17 bp, Arabidopsis thaliana
ttctaaacggacgccat

SEQ ID NO: 163071 - DNA, 17 bp, Arabidopsis thaliana
ttctaaacttcagatgt

SEQ ID NO: 163072 - DNA, 17 bp, Arabidopsis thaliana
ttctaaacttggatcaa

SEQ ID NO: 163073 - DNA, 17 bp, Arabidopsis thaliana
ttctaaacttggatcag

SEQ ID NO: 163074 - DNA, 17 bp, Arabidopsis thaliana
ttctaaagcgtgctctc

SEQ ID NO: 163075 - DNA, 17 bp, Arabidopsis thaliana
ttctaaagtcttcttcc

SEQ ID NO: 163076 - DNA, 17 bp, Arabidopsis thaliana
ttctaaagtcttcttcg

SEQ ID NO: 163077 - DNA, 17 bp, Arabidopsis thaliana
ttctaaattttccgcgt

SEQ ID NO: 163078 - DNA, 17 bp, Arabidopsis thaliana
ttctaacaacaatcagc

SEQ ID NO: 163079 - DNA, 17 bp, Arabidopsis thaliana
ttctaacaaccatcagc

SEQ ID NO: 163080 - DNA, 17 bp, Arabidopsis thaliana
ttctaaccattgcattt

SEQ ID NO: 163081 - DNA, 17 bp, Arabidopsis thaliana
ttctaacccgttgtctg

SEQ ID NO: 163082 - DNA, 17 bp, Arabidopsis thaliana
ttctaaccttgtgtcag

SEQ ID NO: 163083 - DNA, 17 bp, Arabidopsis thaliana
ttctaacttttcgtgcc

SEQ ID NO: 163084 - DNA, 17 bp, Arabidopsis thaliana
ttctaagactggtgatt

SEQ ID NO: 163085 - DNA, 17 bp, Arabidopsis thaliana
ttctaagatgttgtctc

SEQ ID NO: 163086 - DNA, 17 bp, Arabidopsis thaliana
ttctaagattcgcctag

SEQ ID NO: 163087 - DNA, 17 bp, Arabidopsis thaliana
ttctaagatttgtctca

SEQ ID NO: 163088 - DNA, 17 bp, Arabidopsis thaliana
ttctaagcccaacaccc

SEQ ID NO: 163089 - DNA, 17 bp, Arabidopsis thaliana
ttctaagcccaacatag

SEQ ID NO: 163090 - DNA, 17 bp, Arabidopsis thaliana
ttctaagcgatgtggga

SEQ ID NO: 163091 - DNA, 17 bp, Arabidopsis thaliana
ttctaagcgtttgtcac

SEQ ID NO: 163092 - DNA, 17 bp, Arabidopsis thaliana
ttctaagctccggctag

SEQ ID NO: 163093 - DNA, 17 bp, Arabidopsis thaliana
ttctaagcttcgcctag

SEQ ID NO: 163094 - DNA, 17 bp, Arabidopsis thaliana
ttctaagtccaacatac

SEQ ID NO: 163095 - DNA, 17 bp, Arabidopsis thaliana
ttctaagtccaacatag

SEQ ID NO: 163096 - DNA, 17 bp, Arabidopsis thaliana
ttctaagtgtgatagca

SEQ ID NO: 163097 - DNA, 17 bp, Arabidopsis thaliana
ttctaagttcaacataa

SEQ ID NO: 163098 - DNA, 17 bp, Arabidopsis thaliana
ttctaagttcaacatag

SEQ ID NO: 163099 - DNA, 17 bp, Arabidopsis thaliana
ttctaagttcaacatat

SEQ ID NO: 163100 - DNA, 17 bp, Arabidopsis thaliana
ttctaagttcaacatgg

SEQ ID NO: 163101 - DNA, 17 bp, Arabidopsis thaliana
ttctaagttcaacattt

SEQ ID NO: 163102 - DNA, 17 bp, Arabidopsis thaliana
ttctaagttcggtgccg

SEQ ID NO: 163103 - DNA, 17 bp, Arabidopsis thaliana
ttctaagttgagccacg

SEQ ID NO: 163104 - DNA, 17 bp, Arabidopsis thaliana
ttctaatactaccgtcc

SEQ ID NO: 163105 - DNA, 17 bp, Arabidopsis thaliana
ttctaatcatcacgatt

SEQ ID NO: 163106 - DNA, 17 bp, Arabidopsis thaliana
ttctaatcgcttctacg

SEQ ID NO: 163107 - DNA, 17 bp, Arabidopsis thaliana
ttctaatctactgggtt

SEQ ID NO: 163108 - DNA, 17 bp, Arabidopsis thaliana
ttctaatgcccttttca

SEQ ID NO: 163109 - DNA, 17 bp, Arabidopsis thaliana
ttctaatggagttgatc

SEQ ID NO: 163110 - DNA, 17 bp, Arabidopsis thaliana
ttctaatgtggcaaatg

SEQ ID NO: 163111 - DNA, 17 bp, Arabidopsis thaliana
ttctaattctaccgtcc

SEQ ID NO: 163112 - DNA, 17 bp, Arabidopsis thaliana
ttctacaaaatcggcca

SEQ ID NO: 163113 - DNA, 17 bp, Arabidopsis thaliana
ttctacaaccattttgg

SEQ ID NO: 163114 - DNA, 17 bp, Arabidopsis thaliana
ttctacaagagttgcct

SEQ ID NO: 163115 - DNA, 17 bp, Arabidopsis thaliana
ttctacaagttgcactc

SEQ ID NO: 163116 - DNA, 17 bp, Arabidopsis thaliana
ttctacacacgcctatg

SEQ ID NO: 163117 - DNA, 17 bp, Arabidopsis thaliana
ttctacacatgtgttat

SEQ ID NO: 163118 - DNA, 17 bp, Arabidopsis thaliana
ttctacacctttgtcca

SEQ ID NO: 163119 - DNA, 17 bp, Arabidopsis thaliana
ttctacacgagcttcat

SEQ ID NO: 163120 - DNA, 17 bp, Arabidopsis thaliana
ttctacagattacgtcc

SEQ ID NO: 163121 - DNA, 17 bp, Arabidopsis thaliana
ttctacagctgtccttt

SEQ ID NO: 163122 - DNA, 17 bp, Arabidopsis thaliana
ttctacagttggccagg

SEQ ID NO: 163123 - DNA, 17 bp, Arabidopsis thaliana
ttctacagttggtttca

SEQ ID NO: 163124 - DNA, 17 bp, Arabidopsis thaliana
ttctacatcgttccagt

SEQ ID NO: 163125 - DNA, 17 bp, Arabidopsis thaliana
ttctacatctccgagag

SEQ ID NO: 163126 - DNA, 17 bp, Arabidopsis thaliana
ttctacatgcatttcac

SEQ ID NO: 163127 - DNA, 17 bp, Arabidopsis thaliana
ttctacattttccgtcg

SEQ ID NO: 163128 - DNA, 17 bp, Arabidopsis thaliana
ttctaccaaaactgacc

SEQ ID NO: 163129 - DNA, 17 bp, Arabidopsis thaliana
ttctaccaaggcccttt

SEQ ID NO: 163130 - DNA, 17 bp, Arabidopsis thaliana
ttctaccactgcagggc

SEQ ID NO: 163131 - DNA, 17 bp, Arabidopsis thaliana
ttctaccatccgatcaa

SEQ ID NO: 163132 - DNA, 17 bp, Arabidopsis thaliana
ttctacccggagtcggt

SEQ ID NO: 163133 - DNA, 17 bp, Arabidopsis thaliana
ttctaccgaaaataacc

SEQ ID NO: 163134 - DNA, 17 bp, Arabidopsis thaliana
ttctaccgaaacttacc

SEQ ID NO: 163135 - DNA, 17 bp, Arabidopsis thaliana
ttctaccgaagctgacc

SEQ ID NO: 163136 - DNA, 17 bp, Arabidopsis thaliana
ttctaccgagacacaga

SEQ ID NO: 163137 - DNA, 17 bp, Arabidopsis thaliana
ttctaccgaggctgatc

SEQ ID NO: 163138 - DNA, 17 bp, Arabidopsis thaliana
ttctaccgaggctggcc

SEQ ID NO: 163139 - DNA, 17 bp, Arabidopsis thaliana
ttctaccgatcagatca

SEQ ID NO: 163140 - DNA, 17 bp, Arabidopsis thaliana
ttctaccgatgaagatg

SEQ ID NO: 163141 - DNA, 17 bp, Arabidopsis thaliana
ttctaccgatgttaacc

SEQ ID NO: 163142 - DNA, 17 bp, Arabidopsis thaliana
ttctaccgcaagagttg

SEQ ID NO: 163143 - DNA, 17 bp, Arabidopsis thaliana
ttctaccgccgactgat

SEQ ID NO: 163144 - DNA, 17 bp, Arabidopsis thaliana
ttctaccgggtgtcttt

SEQ ID NO: 163145 - DNA, 17 bp, Arabidopsis thaliana
ttctaccgtgcgctgga

SEQ ID NO: 163146 - DNA, 17 bp, Arabidopsis thaliana
ttctacgaacgttggcg

SEQ ID NO: 163147 - DNA, 17 bp, Arabidopsis thaliana
ttctacgactgatgact

SEQ ID NO: 163148 - DNA, 17 bp, Arabidopsis thaliana
ttctacgccttgctgtg

SEQ ID NO: 163149 - DNA, 17 bp, Arabidopsis thaliana
ttctacgcgcttgatgg

SEQ ID NO: 163150 - DNA, 17 bp, Arabidopsis thaliana
ttctacggggacacagg

SEQ ID NO: 163151 - DNA, 17 bp, Arabidopsis thaliana
ttctacgtctcatagct

SEQ ID NO: 163152 - DNA, 17 bp, Arabidopsis thaliana
ttctactaaagctgacc

SEQ ID NO: 163153 - DNA, 17 bp, Arabidopsis thaliana
ttctactaagtcgtgtt

SEQ ID NO: 163154 - DNA, 17 bp, Arabidopsis thaliana
ttctactagatccgctt

SEQ ID NO: 163155 - DNA, 17 bp, Arabidopsis thaliana
ttctactatcctgggcc

SEQ ID NO: 163156 - DNA, 17 bp, Arabidopsis thaliana
ttctactgaggctgcct

SEQ ID NO: 163157 - DNA, 17 bp, Arabidopsis thaliana
ttctactgataccgatc

SEQ ID NO: 163158 - DNA, 17 bp, Arabidopsis thaliana
ttctactgatgaagatg

SEQ ID NO: 163159 - DNA, 17 bp, Arabidopsis thaliana
ttctactgcagaataca

SEQ ID NO: 163160 - DNA, 17 bp, Arabidopsis thaliana
ttctactgggacgaacc

SEQ ID NO: 163161 - DNA, 17 bp, Arabidopsis thaliana
ttctactgtcaatgccc

SEQ ID NO: 163162 - DNA, 17 bp, Arabidopsis thaliana
ttctacttcagtttgtg

SEQ ID NO: 163163 - DNA, 17 bp, Arabidopsis thaliana
ttctacttctctctcgg

SEQ ID NO: 163164 - DNA, 17 bp, Arabidopsis thaliana
ttctacttgaatcgggg

SEQ ID NO: 163165 - DNA, 17 bp, Arabidopsis thaliana
ttctacttgtgtctatg

SEQ ID NO: 163166 - DNA, 17 bp, Arabidopsis thaliana
ttctaggaaaagtggca

SEQ ID NO: 163167 - DNA, 17 bp, Arabidopsis thaliana
ttctaggattctttcca

SEQ ID NO: 163168 - DNA, 17 bp, Arabidopsis thaliana
ttctaggcttccacagt

SEQ ID NO: 163169 - DNA, 17 bp, Arabidopsis thaliana
ttctaggtttgccaagg

SEQ ID NO: 163170 - DNA, 17 bp, Arabidopsis thaliana
ttctaggttttctcagg

SEQ ID NO: 163171 - DNA, 17 bp, Arabidopsis thaliana
ttctaggtttttgctgc

SEQ ID NO: 163172 - DNA, 17 bp, Arabidopsis thaliana
ttctaggtttttgcttc

SEQ ID NO: 163173 - DNA, 17 bp, Arabidopsis thaliana
ttctagttctggctcgt

SEQ ID NO: 163174 - DNA, 17 bp, Arabidopsis thaliana
ttctagttggtggagcg

SEQ ID NO: 163175 - DNA, 17 bp, Arabidopsis thaliana
ttctagtttcgccatta

SEQ ID NO: 163176 - DNA, 17 bp, Arabidopsis thaliana
ttctataccaaaaggta

SEQ ID NO: 163177 - DNA, 17 bp, Arabidopsis thaliana
ttctataccaaaaggtt

SEQ ID NO: 163178 - DNA, 17 bp, Arabidopsis thaliana
ttctatatggcttagac

SEQ ID NO: 163179 - DNA, 17 bp, Arabidopsis thaliana
ttctatcaagtcctgct

SEQ ID NO: 163180 - DNA, 17 bp, Arabidopsis thaliana
ttctatccgggttcact

SEQ ID NO: 163181 - DNA, 17 bp, Arabidopsis thaliana
ttctatcgaggataacc

SEQ ID NO: 163182 - DNA, 17 bp, Arabidopsis thaliana
ttctatcggacgtacca

SEQ ID NO: 163183 - DNA, 17 bp, Arabidopsis thaliana
ttctatcgggtaaagcc

SEQ ID NO: 163184 - DNA, 17 bp, Arabidopsis thaliana
ttctatcggtgtgctga

SEQ ID NO: 163185 - DNA, 17 bp, Arabidopsis thaliana
ttctatgattggtgcca

SEQ ID NO: 163186 - DNA, 17 bp, Arabidopsis thaliana
ttctatggacttcacgg

SEQ ID NO: 163187 - DNA, 17 bp, Arabidopsis thaliana
ttctatggcggctgatc

SEQ ID NO: 163188 - DNA, 17 bp, Arabidopsis thaliana
ttctatggctggtggtg

SEQ ID NO: 163189 - DNA, 17 bp, Arabidopsis thaliana
ttctatgggtggtggcg

SEQ ID NO: 163190 - DNA, 17 bp, Arabidopsis thaliana
ttctatgggtggtggtg

SEQ ID NO: 163191 - DNA, 17 bp, Arabidopsis thaliana
ttctatgggtggtggtt

SEQ ID NO: 163192 - DNA, 17 bp, Arabidopsis thaliana
ttctatggtcaaaatgt

SEQ ID NO: 163193 - DNA, 17 bp, Arabidopsis thaliana
ttctatggtcagaatgt

SEQ ID NO: 163194 - DNA, 17 bp, Arabidopsis thaliana
ttctatgtacccgccga

SEQ ID NO: 163195 - DNA, 17 bp, Arabidopsis thaliana
ttctatgtacccgtcag

SEQ ID NO: 163196 - DNA, 17 bp, Arabidopsis thaliana
ttctatgtggtgtccac

SEQ ID NO: 163197 - DNA, 17 bp, Arabidopsis thaliana
ttctattccttcgaccg

SEQ ID NO: 163198 - DNA, 17 bp, Arabidopsis thaliana
ttctattctaccaaagg

SEQ ID NO: 163199 - DNA, 17 bp, Arabidopsis thaliana
ttctattctactcgctt

SEQ ID NO: 163200 - DNA, 17 bp, Arabidopsis thaliana
ttctattctgcgaaaga

SEQ ID NO: 163201 - DNA, 17 bp, Arabidopsis thaliana
ttctattgagaaaccct

SEQ ID NO: 163202 - DNA, 17 bp, Arabidopsis thaliana
ttctattgctcgatgtc

SEQ ID NO: 163203 - DNA, 17 bp, Arabidopsis thaliana
ttctattggacctggag

SEQ ID NO: 163204 - DNA, 17 bp, Arabidopsis thaliana
ttctatttcttttggtc

SEQ ID NO: 163205 - DNA, 17 bp, Arabidopsis thaliana
ttctatttggatgtcat

SEQ ID NO: 163206 - DNA, 17 bp, Arabidopsis thaliana
ttctcaaaaagatgttt

SEQ ID NO: 163207 - DNA, 17 bp, Arabidopsis thaliana
ttctcaacaaactttgc

SEQ ID NO: 163208 - DNA, 17 bp, Arabidopsis thaliana
ttctcaacacagaaata

SEQ ID NO: 163209 - DNA, 17 bp, Arabidopsis thaliana
ttctcaacacaggaatc

SEQ ID NO: 163210 - DNA, 17 bp, Arabidopsis thaliana
ttctcaacacaggaatg

SEQ ID NO: 163211 - DNA, 17 bp, Arabidopsis thaliana
ttctcaacatctctgga

SEQ ID NO: 163212 - DNA, 17 bp, Arabidopsis thaliana
ttctcaaccctttcatg

SEQ ID NO: 163213 - DNA, 17 bp, Arabidopsis thaliana
ttctcaaccgctccacc

SEQ ID NO: 163214 - DNA, 17 bp, Arabidopsis thaliana
ttctcaacgctttcatg

SEQ ID NO: 163215 - DNA, 17 bp, Arabidopsis thaliana
ttctcaagggaaacgct

SEQ ID NO: 163216 - DNA, 17 bp, Arabidopsis thaliana
ttctcaatggatcattt

SEQ ID NO: 163217 - DNA, 17 bp, Arabidopsis thaliana
ttctcaattaccgcgga

SEQ ID NO: 163218 - DNA, 17 bp, Arabidopsis thaliana
ttctcacaaatgatcta

SEQ ID NO: 163219 - DNA, 17 bp, Arabidopsis thaliana
ttctcacagactgtccc

SEQ ID NO: 163220 - DNA, 17 bp, Arabidopsis thaliana
ttctcacagagagttgt

SEQ ID NO: 163221 - DNA, 17 bp, Arabidopsis thaliana
ttctcaccgtttgtgtc

SEQ ID NO: 163222 - DNA, 17 bp, Arabidopsis thaliana
ttctcacgatatactgc

SEQ ID NO: 163223 - DNA, 17 bp, Arabidopsis thaliana
ttctcacggaaggcagc

SEQ ID NO: 163224 - DNA, 17 bp, Arabidopsis thaliana
ttctcacgtacaaggca

SEQ ID NO: 163225 - DNA, 17 bp, Arabidopsis thaliana
ttctcactatccacctt

SEQ ID NO: 163226 - DNA, 17 bp, Arabidopsis thaliana
ttctcactcgcatggtt

SEQ ID NO: 163227 - DNA, 17 bp, Arabidopsis thaliana
ttctcacttgtccgaga

SEQ ID NO: 163228 - DNA, 17 bp, Arabidopsis thaliana
ttctcagacaggtaatc

SEQ ID NO: 163229 - DNA, 17 bp, Arabidopsis thaliana
ttctcagagattttgcc

SEQ ID NO: 163230 - DNA, 17 bp, Arabidopsis thaliana
ttctcagatgtgttctt

SEQ ID NO: 163231 - DNA, 17 bp, Arabidopsis thaliana
ttctcagcagtggacgg

SEQ ID NO: 163232 - DNA, 17 bp, Arabidopsis thaliana
ttctcagcattgcagtc

SEQ ID NO: 163233 - DNA, 17 bp, Arabidopsis thaliana
ttctcagcgagaaacca

SEQ ID NO: 163234 - DNA, 17 bp, Arabidopsis thaliana
ttctcagctgccagaat

SEQ ID NO: 163235 - DNA, 17 bp, Arabidopsis thaliana
ttctcaggcgttgtctc

SEQ ID NO: 163236 - DNA, 17 bp, Arabidopsis thaliana
ttctcagggtcgttgag

SEQ ID NO: 163237 - DNA, 17 bp, Arabidopsis thaliana
ttctcaggtgagaaacg

SEQ ID NO: 163238 - DNA, 17 bp, Arabidopsis thaliana
ttctcaggtttggaatc

SEQ ID NO: 163239 - DNA, 17 bp, Arabidopsis thaliana
ttctcagtaccgttcga

SEQ ID NO: 163240 - DNA, 17 bp, Arabidopsis thaliana
ttctcagttcatttcgg

SEQ ID NO: 163241 - DNA, 17 bp, Arabidopsis thaliana
ttctcagttcgtggcac

SEQ ID NO: 163242 - DNA, 17 bp, Arabidopsis thaliana
ttctcataaggtgccag

SEQ ID NO: 163243 - DNA, 17 bp, Arabidopsis thaliana
ttctcatacacgggtca

SEQ ID NO: 163244 - DNA, 17 bp, Arabidopsis thaliana
ttctcatacagaatcgt

SEQ ID NO: 163245 - DNA, 17 bp, Arabidopsis thaliana
ttctcataggatcgtgc

SEQ ID NO: 163246 - DNA, 17 bp, Arabidopsis thaliana
ttctcatcacgatccag

SEQ ID NO: 163247 - DNA, 17 bp, Arabidopsis thaliana
ttctcatccaatttgga

SEQ ID NO: 163248 - DNA, 17 bp, Arabidopsis thaliana
ttctcatcgtggtggta

SEQ ID NO: 163249 - DNA, 17 bp, Arabidopsis thaliana
ttctcatctccattgtt

SEQ ID NO: 163250 - DNA, 17 bp, Arabidopsis thaliana
ttctcatctgcaaatct

SEQ ID NO: 163251 - DNA, 17 bp, Arabidopsis thaliana
ttctcatgctaaggatc

SEQ ID NO: 163252 - DNA, 17 bp, Arabidopsis thaliana
ttctcatgtagacgggc

SEQ ID NO: 163253 - DNA, 17 bp, Arabidopsis thaliana
ttctcattaagccgcca

SEQ ID NO: 163254 - DNA, 17 bp, Arabidopsis thaliana
ttctcattccatttggc

SEQ ID NO: 163255 - DNA, 17 bp, Arabidopsis thaliana
ttctcattctacaaaac

SEQ ID NO: 163256 - DNA, 17 bp, Arabidopsis thaliana
ttctcatttcatcgacg

SEQ ID NO: 163257 - DNA, 17 bp, Arabidopsis thaliana
ttctcattttcgcagca

SEQ ID NO: 163258 - DNA, 17 bp, Arabidopsis thaliana
ttctccaaacatgctca

SEQ ID NO: 163259 - DNA, 17 bp, Arabidopsis thaliana
ttctccaaccgaatggc

SEQ ID NO: 163260 - DNA, 17 bp, Arabidopsis thaliana
ttctccaacttcagccg

SEQ ID NO: 163261 - DNA, 17 bp, Arabidopsis thaliana
ttctccaagatcggttt

SEQ ID NO: 163262 - DNA, 17 bp, Arabidopsis thaliana
ttctccaatctgctaga

SEQ ID NO: 163263 - DNA, 17 bp, Arabidopsis thaliana
ttctccaatgccagatc

SEQ ID NO: 163264 - DNA, 17 bp, Arabidopsis thaliana
ttctccacaaacttgat

SEQ ID NO: 163265 - DNA, 17 bp, Arabidopsis thaliana
ttctccacgagaactat

SEQ ID NO: 163266 - DNA, 17 bp, Arabidopsis thaliana
ttctccagaatgctcta

SEQ ID NO: 163267 - DNA, 17 bp, Arabidopsis thaliana
ttctccagcggtgtgca

SEQ ID NO: 163268 - DNA, 17 bp, Arabidopsis thaliana
ttctccagctctactcg

SEQ ID NO: 163269 - DNA, 17 bp, Arabidopsis thaliana
ttctccagtttaaccat

SEQ ID NO: 163270 - DNA, 17 bp, Arabidopsis thaliana
ttctccatatctcctcc

SEQ ID NO: 163271 - DNA, 17 bp, Arabidopsis thaliana
ttctccatcccaaagct

SEQ ID NO: 163272 - DNA, 17 bp, Arabidopsis thaliana
ttctccatcccatttac

SEQ ID NO: 163273 - DNA, 17 bp, Arabidopsis thaliana
ttctccatcgcgtgact

SEQ ID NO: 163274 - DNA, 17 bp, Arabidopsis thaliana
ttctccatcttgttgag

SEQ ID NO: 163275 - DNA, 17 bp, Arabidopsis thaliana
ttctccatgcctgaact

SEQ ID NO: 163276 - DNA, 17 bp, Arabidopsis thaliana
ttctccatgcgcttgat

SEQ ID NO: 163277 - DNA, 17 bp, Arabidopsis thaliana
ttctccatgctaatctc

SEQ ID NO: 163278 - DNA, 17 bp, Arabidopsis thaliana
ttctccatggtgtcggc

SEQ ID NO: 163279 - DNA, 17 bp, Arabidopsis thaliana
ttctccatttaaagtgc

SEQ ID NO: 163280 - DNA, 17 bp, Arabidopsis thaliana
ttctcccagatgtgtgc

SEQ ID NO: 163281 - DNA, 17 bp, Arabidopsis thaliana
ttctcccatttatttgc

SEQ ID NO: 163282 - DNA, 17 bp, Arabidopsis thaliana
ttctcccgaggctcgct

SEQ ID NO: 163283 - DNA, 17 bp, Arabidopsis thaliana
ttctcccgctcttttgc

SEQ ID NO: 163284 - DNA, 17 bp, Arabidopsis thaliana
ttctcccggtaggacct

SEQ ID NO: 163285 - DNA, 17 bp, Arabidopsis thaliana
ttctcccgtcagttgcc

SEQ ID NO: 163286 - DNA, 17 bp, Arabidopsis thaliana
ttctccctgtataggcc

SEQ ID NO: 163287 - DNA, 17 bp, Arabidopsis thaliana
ttctcccttctactttc

SEQ ID NO: 163288 - DNA, 17 bp, Arabidopsis thaliana
ttctccgaaagtgcctc

SEQ ID NO: 163289 - DNA, 17 bp, Arabidopsis thaliana
ttctccgaaagtgtttt

SEQ ID NO: 163290 - DNA, 17 bp, Arabidopsis thaliana
ttctccgaagcagaaat

SEQ ID NO: 163291 - DNA, 17 bp, Arabidopsis thaliana
ttctccgacaacatctc

SEQ ID NO: 163292 - DNA, 17 bp, Arabidopsis thaliana
ttctccgacagctgcgt

SEQ ID NO: 163293 - DNA, 17 bp, Arabidopsis thaliana
ttctccgatcatatgat

SEQ ID NO: 163294 - DNA, 17 bp, Arabidopsis thaliana
ttctccgatgaaggctt

SEQ ID NO: 163295 - DNA, 17 bp, Arabidopsis thaliana
ttctccgatgtatttgt

SEQ ID NO: 163296 - DNA, 17 bp, Arabidopsis thaliana
ttctccgattagacttc

SEQ ID NO: 163297 - DNA, 17 bp, Arabidopsis thaliana
ttctccgccaactctgt

SEQ ID NO: 163298 - DNA, 17 bp, Arabidopsis thaliana
ttctccgccgtcacagc

SEQ ID NO: 163299 - DNA, 17 bp, Arabidopsis thaliana
ttctccgcttggtttgc

SEQ ID NO: 163300 - DNA, 17 bp, Arabidopsis thaliana
ttctccggaatcggttt

SEQ ID NO: 163301 - DNA, 17 bp, Arabidopsis thaliana
ttctccggcaggtcgga

SEQ ID NO: 163302 - DNA, 17 bp, Arabidopsis thaliana
ttctccggcgagacgta

SEQ ID NO: 163303 - DNA, 17 bp, Arabidopsis thaliana
ttctccggcgtagatag

SEQ ID NO: 163304 - DNA, 17 bp, Arabidopsis thaliana
ttctccgggcttggtga

SEQ ID NO: 163305 - DNA, 17 bp, Arabidopsis thaliana
ttctccggtcttcgctt

SEQ ID NO: 163306 - DNA, 17 bp, Arabidopsis thaliana
ttctccggtgttgctgc

SEQ ID NO: 163307 - DNA, 17 bp, Arabidopsis thaliana
ttctccgtgtttgatgt

SEQ ID NO: 163308 - DNA, 17 bp, Arabidopsis thaliana
ttctcctagaccatctc

SEQ ID NO: 163309 - DNA, 17 bp, Arabidopsis thaliana
ttctcctatagtgttac

SEQ ID NO: 163310 - DNA, 17 bp, Arabidopsis thaliana
ttctcctatcactggac

SEQ ID NO: 163311 - DNA, 17 bp, Arabidopsis thaliana
ttctcctatctttgtta

SEQ ID NO: 163312 - DNA, 17 bp, Arabidopsis thaliana
ttctcctctttgcgaga

SEQ ID NO: 163313 - DNA, 17 bp, Arabidopsis thaliana
ttctcctgcgtgtgggc

SEQ ID NO: 163314 - DNA, 17 bp, Arabidopsis thaliana
ttctcctgggcaccacc

SEQ ID NO: 163315 - DNA, 17 bp, Arabidopsis thaliana
ttctcctgggcagcacc

SEQ ID NO: 163316 - DNA, 17 bp, Arabidopsis thaliana
ttctcctggttctggcg

SEQ ID NO: 163317 - DNA, 17 bp, Arabidopsis thaliana
ttctcctgtcactgtca

SEQ ID NO: 163318 - DNA, 17 bp, Arabidopsis thaliana
ttctccttaacaactga

SEQ ID NO: 163319 - DNA, 17 bp, Arabidopsis thaliana
ttctccttcaagtttgc

SEQ ID NO: 163320 - DNA, 17 bp, Arabidopsis thaliana
ttctccttctcaatgcg

SEQ ID NO: 163321 - DNA, 17 bp, Arabidopsis thaliana
ttctccttctgcgcttc

SEQ ID NO: 163322 - DNA, 17 bp, Arabidopsis thaliana
ttctccttcttcgctgc

SEQ ID NO: 163323 - DNA, 17 bp, Arabidopsis thaliana
ttctccttcttgcgtgc

SEQ ID NO: 163324 - DNA, 17 bp, Arabidopsis thaliana
ttctccttggggttgta

SEQ ID NO: 163325 - DNA, 17 bp, Arabidopsis thaliana
ttctcctttcaggtgtt

SEQ ID NO: 163326 - DNA, 17 bp, Arabidopsis thaliana
ttctccttttgtgtccg

SEQ ID NO: 163327 - DNA, 17 bp, Arabidopsis thaliana
ttctccttttttcagcg

SEQ ID NO: 163328 - DNA, 17 bp, Arabidopsis thaliana
ttctcgaatgaaggaag

SEQ ID NO: 163329 - DNA, 17 bp, Arabidopsis thaliana
ttctcgaatggtcgtgc

SEQ ID NO: 163330 - DNA, 17 bp, Arabidopsis thaliana
ttctcgaccgaggttct

SEQ ID NO: 163331 - DNA, 17 bp, Arabidopsis thaliana
ttctcgaccgtgctcaa

SEQ ID NO: 163332 - DNA, 17 bp, Arabidopsis thaliana
ttctcgagataggtttt

SEQ ID NO: 163333 - DNA, 17 bp, Arabidopsis thaliana
ttctcgagatctgcggt

SEQ ID NO: 163334 - DNA, 17 bp, Arabidopsis thaliana
ttctcgagccgtctgga

SEQ ID NO: 163335 - DNA, 17 bp, Arabidopsis thaliana
ttctcgagtaaatattg

SEQ ID NO: 163336 - DNA, 17 bp, Arabidopsis thaliana
ttctcgataaactccgc

SEQ ID NO: 163337 - DNA, 17 bp, Arabidopsis thaliana
ttctcgatcttagtcct

SEQ ID NO: 163338 - DNA, 17 bp, Arabidopsis thaliana
ttctcgatgtctaccag

SEQ ID NO: 163339 - DNA, 17 bp, Arabidopsis thaliana
ttctcgattaaagatcc

SEQ ID NO: 163340 - DNA, 17 bp, Arabidopsis thaliana
ttctcgcaggagaaact

SEQ ID NO: 163341 - DNA, 17 bp, Arabidopsis thaliana
ttctcgctggttgttgc

SEQ ID NO: 163342 - DNA, 17 bp, Arabidopsis thaliana
ttctcggaaccgggcat

SEQ ID NO: 163343 - DNA, 17 bp, Arabidopsis thaliana
ttctcggaatcggtgtt

SEQ ID NO: 163344 - DNA, 17 bp, Arabidopsis thaliana
ttctcggaatgcccccc

SEQ ID NO: 163345 - DNA, 17 bp, Arabidopsis thaliana
ttctcggacatccggcc

SEQ ID NO: 163346 - DNA, 17 bp, Arabidopsis thaliana
ttctcggagaccattag

SEQ ID NO: 163347 - DNA, 17 bp, Arabidopsis thaliana
ttctcggatggaagttc

SEQ ID NO: 163348 - DNA, 17 bp, Arabidopsis thaliana
ttctcggcaggtcagtt

SEQ ID NO: 163349 - DNA, 17 bp, Arabidopsis thaliana
ttctcggccattttgag

SEQ ID NO: 163350 - DNA, 17 bp, Arabidopsis thaliana
ttctcggccttttggct

SEQ ID NO: 163351 - DNA, 17 bp, Arabidopsis thaliana
ttctcgggaggtcacct

SEQ ID NO: 163352 - DNA, 17 bp, Arabidopsis thaliana
ttctcgggttggtttgc

SEQ ID NO: 163353 - DNA, 17 bp, Arabidopsis thaliana
ttctcggttgccaggtt

SEQ ID NO: 163354 - DNA, 17 bp, Arabidopsis thaliana
ttctcggttgcggacga

SEQ ID NO: 163355 - DNA, 17 bp, Arabidopsis thaliana
ttctcggttgctatgtt

SEQ ID NO: 163356 - DNA, 17 bp, Arabidopsis thaliana
ttctcggttttgctcca

SEQ ID NO: 163357 - DNA, 17 bp, Arabidopsis thaliana
ttctcgtaacctggctc

SEQ ID NO: 163358 - DNA, 17 bp, Arabidopsis thaliana
ttctcgtacccgggctc

SEQ ID NO: 163359 - DNA, 17 bp, Arabidopsis thaliana
ttctcgtactcgtgact

SEQ ID NO: 163360 - DNA, 17 bp, Arabidopsis thaliana
ttctcgtagtgatgttc

SEQ ID NO: 163361 - DNA, 17 bp, Arabidopsis thaliana
ttctcgtccgacttcag

SEQ ID NO: 163362 - DNA, 17 bp, Arabidopsis thaliana
ttctcgtccttctctat

SEQ ID NO: 163363 - DNA, 17 bp, Arabidopsis thaliana
ttctcgtcgatttggtc

SEQ ID NO: 163364 - DNA, 17 bp, Arabidopsis thaliana
ttctcgtctaacgtccc

SEQ ID NO: 163365 - DNA, 17 bp, Arabidopsis thaliana
ttctcgtgagaaacctc

SEQ ID NO: 163366 - DNA, 17 bp, Arabidopsis thaliana
ttctcgtgattctctat

SEQ ID NO: 163367 - DNA, 17 bp, Arabidopsis thaliana
ttctcgtggggaaatag

SEQ ID NO: 163368 - DNA, 17 bp, Arabidopsis thaliana
ttctcgtgttgctccag

SEQ ID NO: 163369 - DNA, 17 bp, Arabidopsis thaliana
ttctcgtgtttcgcagg

SEQ ID NO: 163370 - DNA, 17 bp, Arabidopsis thaliana
ttctcgttcaggtcgcc

SEQ ID NO: 163371 - DNA, 17 bp, Arabidopsis thaliana
ttctcgttccagtgctt

SEQ ID NO: 163372 - DNA, 17 bp, Arabidopsis thaliana
ttctcgttcttctgcag

SEQ ID NO: 163373 - DNA, 17 bp, Arabidopsis thaliana
ttctcgttgttgtgcca

SEQ ID NO: 163374 - DNA, 17 bp, Arabidopsis thaliana
ttctctaagtgcccttg

SEQ ID NO: 163375 - DNA, 17 bp, Arabidopsis thaliana
ttctctaatagaactcc

SEQ ID NO: 163376 - DNA, 17 bp, Arabidopsis thaliana
ttctctacaattggcgc

SEQ ID NO: 163377 - DNA, 17 bp, Arabidopsis thaliana
ttctctacgctatgttg

SEQ ID NO: 163378 - DNA, 17 bp, Arabidopsis thaliana
ttctctagaactctact

SEQ ID NO: 163379 - DNA, 17 bp, Arabidopsis thaliana
ttctctagcatggactc

SEQ ID NO: 163380 - DNA, 17 bp, Arabidopsis thaliana
ttctctatacctccatc

SEQ ID NO: 163381 - DNA, 17 bp, Arabidopsis thaliana
ttctctatctcaggcac

SEQ ID NO: 163382 - DNA, 17 bp, Arabidopsis thaliana
ttctctatgcgcttgat

SEQ ID NO: 163383 - DNA, 17 bp, Arabidopsis thaliana
ttctctatgtggtacct

SEQ ID NO: 163384 - DNA, 17 bp, Arabidopsis thaliana
ttctctattaggcacaa

SEQ ID NO: 163385 - DNA, 17 bp, Arabidopsis thaliana
ttctctattgccgacat

SEQ ID NO: 163386 - DNA, 17 bp, Arabidopsis thaliana
ttctctattgccgactt

SEQ ID NO: 163387 - DNA, 17 bp, Arabidopsis thaliana
ttctctattttgggcac

SEQ ID NO: 163388 - DNA, 17 bp, Arabidopsis thaliana
ttctctcaacggtgatg

SEQ ID NO: 163389 - DNA, 17 bp, Arabidopsis thaliana
ttctctcaatggtgatg

SEQ ID NO: 163390 - DNA, 17 bp, Arabidopsis thaliana
ttctctcagtgtcgtac

SEQ ID NO: 163391 - DNA, 17 bp, Arabidopsis thaliana
ttctctcatcggtcgat

SEQ ID NO: 163392 - DNA, 17 bp, Arabidopsis thaliana
ttctctcctccgttctt

SEQ ID NO: 163393 - DNA, 17 bp, Arabidopsis thaliana
ttctctcctgaatctcg

SEQ ID NO: 163394 - DNA, 17 bp, Arabidopsis thaliana
ttctctccttgtggatt

SEQ ID NO: 163395 - DNA, 17 bp, Arabidopsis thaliana
ttctctccttgttggtt

SEQ ID NO: 163396 - DNA, 17 bp, Arabidopsis thaliana
ttctctcgatgatgtgc

SEQ ID NO: 163397 - DNA, 17 bp, Arabidopsis thaliana
ttctctcggcagatctt

SEQ ID NO: 163398 - DNA, 17 bp, Arabidopsis thaliana
ttctctcgggtttacgt

SEQ ID NO: 163399 - DNA, 17 bp, Arabidopsis thaliana
ttctctctcctgagtga

SEQ ID NO: 163400 - DNA, 17 bp, Arabidopsis thaliana
ttctctcttgtatttgg

SEQ ID NO: 163401 - DNA, 17 bp, Arabidopsis thaliana
ttctctgaagatctttg

SEQ ID NO: 163402 - DNA, 17 bp, Arabidopsis thaliana
ttctctgacagaatcgc

SEQ ID NO: 163403 - DNA, 17 bp, Arabidopsis thaliana
ttctctgacctcaggtt

SEQ ID NO: 163404 - DNA, 17 bp, Arabidopsis thaliana
ttctctgagatcgtttg

SEQ ID NO: 163405 - DNA, 17 bp, Arabidopsis thaliana
ttctctgagattgtttg

SEQ ID NO: 163406 - DNA, 17 bp, Arabidopsis thaliana
ttctctgagccagcctg

SEQ ID NO: 163407 - DNA, 17 bp, Arabidopsis thaliana
ttctctgatctacttgc

SEQ ID NO: 163408 - DNA, 17 bp, Arabidopsis thaliana
ttctctgcaataacgct

SEQ ID NO: 163409 - DNA, 17 bp, Arabidopsis thaliana
ttctctgccctctgctg

SEQ ID NO: 163410 - DNA, 17 bp, Arabidopsis thaliana
ttctctgcctgggtgtc

SEQ ID NO: 163411 - DNA, 17 bp, Arabidopsis thaliana
ttctctgctacggacct

SEQ ID NO: 163412 - DNA, 17 bp, Arabidopsis thaliana
ttctctgcttggagttt

SEQ ID NO: 163413 - DNA, 17 bp, Arabidopsis thaliana
ttctctggcctcttcta

SEQ ID NO: 163414 - DNA, 17 bp, Arabidopsis thaliana
ttctctggctgcgtcag

SEQ ID NO: 163415 - DNA, 17 bp, Arabidopsis thaliana
ttctctggtaacgacaa

SEQ ID NO: 163416 - DNA, 17 bp, Arabidopsis thaliana
ttctctggtgacgctac

SEQ ID NO: 163417 - DNA, 17 bp, Arabidopsis thaliana
ttctctggttgtgtgat

SEQ ID NO: 163418 - DNA, 17 bp, Arabidopsis thaliana
ttctctggtttgcttca

SEQ ID NO: 163419 - DNA, 17 bp, Arabidopsis thaliana
ttctctggttttcaaag

SEQ ID NO: 163420 - DNA, 17 bp, Arabidopsis thaliana
ttctctggttttttgcc

SEQ ID NO: 163421 - DNA, 17 bp, Arabidopsis thaliana
ttctctgttgcccatca

SEQ ID NO: 163422 - DNA, 17 bp, Arabidopsis thaliana
ttctcttaaaccgcaac

SEQ ID NO: 163423 - DNA, 17 bp, Arabidopsis thaliana
ttctcttacctccacct

SEQ ID NO: 163424 - DNA, 17 bp, Arabidopsis thaliana
ttctcttagcctttgga

SEQ ID NO: 163425 - DNA, 17 bp, Arabidopsis thaliana
ttctcttataatctccg

SEQ ID NO: 163426 - DNA, 17 bp, Arabidopsis thaliana
ttctcttatggctgagc

SEQ ID NO: 163427 - DNA, 17 bp, Arabidopsis thaliana
ttctcttcagtcggcat

SEQ ID NO: 163428 - DNA, 17 bp, Arabidopsis thaliana
ttctcttcattccgcga

SEQ ID NO: 163429 - DNA, 17 bp, Arabidopsis thaliana
ttctcttccttatgctc

SEQ ID NO: 163430 - DNA, 17 bp, Arabidopsis thaliana
ttctcttcggtgtgatg

SEQ ID NO: 163431 - DNA, 17 bp, Arabidopsis thaliana
ttctcttctacctggat

SEQ ID NO: 163432 - DNA, 17 bp, Arabidopsis thaliana
ttctcttgggagaacga

SEQ ID NO: 163433 - DNA, 17 bp, Arabidopsis thaliana
ttctcttgggtgaacga

SEQ ID NO: 163434 - DNA, 17 bp, Arabidopsis thaliana
ttctcttggttttggac

SEQ ID NO: 163435 - DNA, 17 bp, Arabidopsis thaliana
ttctctttatggctcag

SEQ ID NO: 163436 - DNA, 17 bp, Arabidopsis thaliana
ttctctttctcttccca

SEQ ID NO: 163437 - DNA, 17 bp, Arabidopsis thaliana
ttctctttctgtcgcac

SEQ ID NO: 163438 - DNA, 17 bp, Arabidopsis thaliana
ttctctttctgtcgccc

SEQ ID NO: 163439 - DNA, 17 bp, Arabidopsis thaliana
ttctctttgcatggctg

SEQ ID NO: 163440 - DNA, 17 bp, Arabidopsis thaliana
ttctctttgtggacgac

SEQ ID NO: 163441 - DNA, 17 bp, Arabidopsis thaliana
ttctctttttcccgttg

SEQ ID NO: 163442 - DNA, 17 bp, Arabidopsis thaliana
ttctgaaaacagagacg

SEQ ID NO: 163443 - DNA, 17 bp, Arabidopsis thaliana
ttctgaaacccgtcggc

SEQ ID NO: 163444 - DNA, 17 bp, Arabidopsis thaliana
ttctgaaactgaccgtg

SEQ ID NO: 163445 - DNA, 17 bp, Arabidopsis thaliana
ttctgaaagtgaccgtg

SEQ ID NO: 163446 - DNA, 17 bp, Arabidopsis thaliana
ttctgaaccatcaccca

SEQ ID NO: 163447 - DNA, 17 bp, Arabidopsis thaliana
ttctgaactgcaatgga

SEQ ID NO: 163448 - DNA, 17 bp, Arabidopsis thaliana
ttctgaactgctttgcc

SEQ ID NO: 163449 - DNA, 17 bp, Arabidopsis thaliana
ttctgaagttgtctgtc

SEQ ID NO: 163450 - DNA, 17 bp, Arabidopsis thaliana
ttctgaagttgtgtgtc

SEQ ID NO: 163451 - DNA, 17 bp, Arabidopsis thaliana
ttctgaagttgtgtgtt

SEQ ID NO: 163452 - DNA, 17 bp, Arabidopsis thaliana
ttctgaatttatcgggt

SEQ ID NO: 163453 - DNA, 17 bp, Arabidopsis thaliana
ttctgacaaagccactt

SEQ ID NO: 163454 - DNA, 17 bp, Arabidopsis thaliana
ttctgacacctctagct

SEQ ID NO: 163455 - DNA, 17 bp, Arabidopsis thaliana
ttctgacatagtgccta

SEQ ID NO: 163456 - DNA, 17 bp, Arabidopsis thaliana
ttctgaccaggcttcat

SEQ ID NO: 163457 - DNA, 17 bp, Arabidopsis thaliana
ttctgaccatgggatgt

SEQ ID NO: 163458 - DNA, 17 bp, Arabidopsis thaliana
ttctgacccttattaga

SEQ ID NO: 163459 - DNA, 17 bp, Arabidopsis thaliana
ttctgaccgaactttca

SEQ ID NO: 163460 - DNA, 17 bp, Arabidopsis thaliana
ttctgacggaaattctg

SEQ ID NO: 163461 - DNA, 17 bp, Arabidopsis thaliana
ttctgacggaaggcaac

SEQ ID NO: 163462 - DNA, 17 bp, Arabidopsis thaliana
ttctgacggaggtgtca

SEQ ID NO: 163463 - DNA, 17 bp, Arabidopsis thaliana
ttctgactaccaggtaa

SEQ ID NO: 163464 - DNA, 17 bp, Arabidopsis thaliana
ttctgactctctttaga

SEQ ID NO: 163465 - DNA, 17 bp, Arabidopsis thaliana
ttctgactgcggcggcg

SEQ ID NO: 163466 - DNA, 17 bp, Arabidopsis thaliana
ttctgacttattctcca

SEQ ID NO: 163467 - DNA, 17 bp, Arabidopsis thaliana
ttctgagaagggttcga

SEQ ID NO: 163468 - DNA, 17 bp, Arabidopsis thaliana
ttctgagaatcagacta

SEQ ID NO: 163469 - DNA, 17 bp, Arabidopsis thaliana
ttctgagaatcagactg

SEQ ID NO: 163470 - DNA, 17 bp, Arabidopsis thaliana
ttctgagaatcagactt

SEQ ID NO: 163471 - DNA, 17 bp, Arabidopsis thaliana
ttctgagaccgcggaat

SEQ ID NO: 163472 - DNA, 17 bp, Arabidopsis thaliana
ttctgagactggcgtcc

SEQ ID NO: 163473 - DNA, 17 bp, Arabidopsis thaliana
ttctgagccgaaagttg

SEQ ID NO: 163474 - DNA, 17 bp, Arabidopsis thaliana
ttctgagccggccatta

SEQ ID NO: 163475 - DNA, 17 bp, Arabidopsis thaliana
ttctgagcctaagcacg

SEQ ID NO: 163476 - DNA, 17 bp, Arabidopsis thaliana
ttctgagccttaatttt

SEQ ID NO: 163477 - DNA, 17 bp, Arabidopsis thaliana
ttctgagctgactgttc

SEQ ID NO: 163478 - DNA, 17 bp, Arabidopsis thaliana
ttctgagctttgttcca

SEQ ID NO: 163479 - DNA, 17 bp, Arabidopsis thaliana
ttctgaggaagaggttg

SEQ ID NO: 163480 - DNA, 17 bp, Arabidopsis thaliana
ttctgaggaggctccac

SEQ ID NO: 163481 - DNA, 17 bp, Arabidopsis thaliana
ttctgaggattacggtt

SEQ ID NO: 163482 - DNA, 17 bp, Arabidopsis thaliana
ttctgagtttgaccgtg

SEQ ID NO: 163483 - DNA, 17 bp, Arabidopsis thaliana
ttctgagtttgaccttg

SEQ ID NO: 163484 - DNA, 17 bp, Arabidopsis thaliana
ttctgatacttgatagc

SEQ ID NO: 163485 - DNA, 17 bp, Arabidopsis thaliana
ttctgatacttgatagt

SEQ ID NO: 163486 - DNA, 17 bp, Arabidopsis thaliana
ttctgatccacctgact

SEQ ID NO: 163487 - DNA, 17 bp, Arabidopsis thaliana
ttctgatccacctgatt

SEQ ID NO: 163488 - DNA, 17 bp, Arabidopsis thaliana
ttctgatccgaactttg

SEQ ID NO: 163489 - DNA, 17 bp, Arabidopsis thaliana
ttctgatcgcgaggtgt

SEQ ID NO: 163490 - DNA, 17 bp, Arabidopsis thaliana
ttctgatcgtgccctgg

SEQ ID NO: 163491 - DNA, 17 bp, Arabidopsis thaliana
ttctgatcttcagcgga

SEQ ID NO: 163492 - DNA, 17 bp, Arabidopsis thaliana
ttctgatgggatccggt

SEQ ID NO: 163493 - DNA, 17 bp, Arabidopsis thaliana
ttctgatgggccgttct

SEQ ID NO: 163494 - DNA, 17 bp, Arabidopsis thaliana
ttctgatggtatgcctc

SEQ ID NO: 163495 - DNA, 17 bp, Arabidopsis thaliana
ttctgattcctcaatgc

SEQ ID NO: 163496 - DNA, 17 bp, Arabidopsis thaliana
ttctgatttcctcgtga

SEQ ID NO: 163497 - DNA, 17 bp, Arabidopsis thaliana
ttctgcaaagcaaagag

SEQ ID NO: 163498 - DNA, 17 bp, Arabidopsis thaliana
ttctgcaaaggtttgct

SEQ ID NO: 163499 - DNA, 17 bp, Arabidopsis thaliana
ttctgcacagtccacag

SEQ ID NO: 163500 - DNA, 17 bp, Arabidopsis thaliana
ttctgcaccggaaggat

SEQ ID NO: 163501 - DNA, 17 bp, Arabidopsis thaliana
ttctgcagtaagcggct

SEQ ID NO: 163502 - DNA, 17 bp, Arabidopsis thaliana
ttctgcagtggacacgg

SEQ ID NO: 163503 - DNA, 17 bp, Arabidopsis thaliana
ttctgccaaacccgtcc

SEQ ID NO: 163504 - DNA, 17 bp, Arabidopsis thaliana
ttctgccaactgtgtcc

SEQ ID NO: 163505 - DNA, 17 bp, Arabidopsis thaliana
ttctgccagggctaacc

SEQ ID NO: 163506 - DNA, 17 bp, Arabidopsis thaliana
ttctgcccagtgctctg

SEQ ID NO: 163507 - DNA, 17 bp, Arabidopsis thaliana
ttctgcccgtgcgcagg

SEQ ID NO: 163508 - DNA, 17 bp, Arabidopsis thaliana
ttctgccgaccgggttg

SEQ ID NO: 163509 - DNA, 17 bp, Arabidopsis thaliana
ttctgccgagccatgaa

SEQ ID NO: 163510 - DNA, 17 bp, Arabidopsis thaliana
ttctgccgccgtctgct

SEQ ID NO: 163511 - DNA, 17 bp, Arabidopsis thaliana
ttctgcctatcggacac

SEQ ID NO: 163512 - DNA, 17 bp, Arabidopsis thaliana
ttctgcctctatcaggc

SEQ ID NO: 163513 - DNA, 17 bp, Arabidopsis thaliana
ttctgcctgttactcga

SEQ ID NO: 163514 - DNA, 17 bp, Arabidopsis thaliana
ttctgcgaatttgatgt

SEQ ID NO: 163515 - DNA, 17 bp, Arabidopsis thaliana
ttctgcgacttcgacaa

SEQ ID NO: 163516 - DNA, 17 bp, Arabidopsis thaliana
ttctgcgattcttctac

SEQ ID NO: 163517 - DNA, 17 bp, Arabidopsis thaliana
ttctgcgcccgagttaa

SEQ ID NO: 163518 - DNA, 17 bp, Arabidopsis thaliana
ttctgcgccgaagagag

SEQ ID NO: 163519 - DNA, 17 bp, Arabidopsis thaliana
ttctgcgcttagagacg

SEQ ID NO: 163520 - DNA, 17 bp, Arabidopsis thaliana
ttctgcggcaggttatc

SEQ ID NO: 163521 - DNA, 17 bp, Arabidopsis thaliana
ttctgcggctctcatac

SEQ ID NO: 163522 - DNA, 17 bp, Arabidopsis thaliana
ttctgcgggaagcattt

SEQ ID NO: 163523 - DNA, 17 bp, Arabidopsis thaliana
ttctgcggtttcactac

SEQ ID NO: 163524 - DNA, 17 bp, Arabidopsis thaliana
ttctgcgtacaatggtt

SEQ ID NO: 163525 - DNA, 17 bp, Arabidopsis thaliana
ttctgctaaaccgcttg

SEQ ID NO: 163526 - DNA, 17 bp, Arabidopsis thaliana
ttctgctagctcctgag

SEQ ID NO: 163527 - DNA, 17 bp, Arabidopsis thaliana
ttctgctatgttgctgc

SEQ ID NO: 163528 - DNA, 17 bp, Arabidopsis thaliana
ttctgctcaagacgctt

SEQ ID NO: 163529 - DNA, 17 bp, Arabidopsis thaliana
ttctgctccggccagca

SEQ ID NO: 163530 - DNA, 17 bp, Arabidopsis thaliana
ttctgctcctgctgata

SEQ ID NO: 163531 - DNA, 17 bp, Arabidopsis thaliana
ttctgctcgcctctgtc

SEQ ID NO: 163532 - DNA, 17 bp, Arabidopsis thaliana
ttctgctgaaagtggac

SEQ ID NO: 163533 - DNA, 17 bp, Arabidopsis thaliana
ttctgctgactacagac

SEQ ID NO: 163534 - DNA, 17 bp, Arabidopsis thaliana
ttctgctgatgatttgc

SEQ ID NO: 163535 - DNA, 17 bp, Arabidopsis thaliana
ttctgctgcagaatgtc

SEQ ID NO: 163536 - DNA, 17 bp, Arabidopsis thaliana
ttctgctgctggagcgt

SEQ ID NO: 163537 - DNA, 17 bp, Arabidopsis thaliana
ttctgctgggccgaaac

SEQ ID NO: 163538 - DNA, 17 bp, Arabidopsis thaliana
ttctgctggtggtgatt

SEQ ID NO: 163539 - DNA, 17 bp, Arabidopsis thaliana
ttctgctgtggccagca

SEQ ID NO: 163540 - DNA, 17 bp, Arabidopsis thaliana
ttctgctgttcggatcc

SEQ ID NO: 163541 - DNA, 17 bp, Arabidopsis thaliana
ttctgcttcagtttgtg

SEQ ID NO: 163542 - DNA, 17 bp, Arabidopsis thaliana
ttctgcttccgaggatt

SEQ ID NO: 163543 - DNA, 17 bp, Arabidopsis thaliana
ttctgcttctttgcgcc

SEQ ID NO: 163544 - DNA, 17 bp, Arabidopsis thaliana
ttctgcttgatctggtt

SEQ ID NO: 163545 - DNA, 17 bp, Arabidopsis thaliana
ttctgctttctagtttc

SEQ ID NO: 163546 - DNA, 17 bp, Arabidopsis thaliana
ttctggaaagttggtta

SEQ ID NO: 163547 - DNA, 17 bp, Arabidopsis thaliana
ttctggacccctcttct

SEQ ID NO: 163548 - DNA, 17 bp, Arabidopsis thaliana
ttctggaccgaatcccg

SEQ ID NO: 163549 - DNA, 17 bp, Arabidopsis thaliana
ttctggactgaagcccg

SEQ ID NO: 163550 - DNA, 17 bp, Arabidopsis thaliana
ttctggactgccggcat

SEQ ID NO: 163551 - DNA, 17 bp, Arabidopsis thaliana
ttctggactggggtggt

SEQ ID NO: 163552 - DNA, 17 bp, Arabidopsis thaliana
ttctggatccctcttct

SEQ ID NO: 163553 - DNA, 17 bp, Arabidopsis thaliana
ttctggatcgaagcatt

SEQ ID NO: 163554 - DNA, 17 bp, Arabidopsis thaliana
ttctggatgagtggtgg

SEQ ID NO: 163555 - DNA, 17 bp, Arabidopsis thaliana
ttctggcaaatgcggga

SEQ ID NO: 163556 - DNA, 17 bp, Arabidopsis thaliana
ttctggcaagctctcag

SEQ ID NO: 163557 - DNA, 17 bp, Arabidopsis thaliana
ttctggcaggagagacg

SEQ ID NO: 163558 - DNA, 17 bp, Arabidopsis thaliana
ttctggcccgcccattc

SEQ ID NO: 163559 - DNA, 17 bp, Arabidopsis thaliana
ttctggccgaagcccgt

SEQ ID NO: 163560 - DNA, 17 bp, Arabidopsis thaliana
ttctggccgagggcacg

SEQ ID NO: 163561 - DNA, 17 bp, Arabidopsis thaliana
ttctggccgagggcctt

SEQ ID NO: 163562 - DNA, 17 bp, Arabidopsis thaliana
ttctggcctttccatga

SEQ ID NO: 163563 - DNA, 17 bp, Arabidopsis thaliana
ttctggccttttcgtga

SEQ ID NO: 163564 - DNA, 17 bp, Arabidopsis thaliana
ttctggcgcttttgctt

SEQ ID NO: 163565 - DNA, 17 bp, Arabidopsis thaliana
ttctgggaccgtaggta

SEQ ID NO: 163566 - DNA, 17 bp, Arabidopsis thaliana
ttctgggccgaatctcg

SEQ ID NO: 163567 - DNA, 17 bp, Arabidopsis thaliana
ttctgggccgcacgcgt

SEQ ID NO: 163568 - DNA, 17 bp, Arabidopsis thaliana
ttctgggctttggttta

SEQ ID NO: 163569 - DNA, 17 bp, Arabidopsis thaliana
ttctggggcgtaggcct

SEQ ID NO: 163570 - DNA, 17 bp, Arabidopsis thaliana
ttctggggctggaccag

SEQ ID NO: 163571 - DNA, 17 bp, Arabidopsis thaliana
ttctggtaatctggact

SEQ ID NO: 163572 - DNA, 17 bp, Arabidopsis thaliana
ttctggtatgggtcccg

SEQ ID NO: 163573 - DNA, 17 bp, Arabidopsis thaliana
ttctggtatggttgcgg

SEQ ID NO: 163574 - DNA, 17 bp, Arabidopsis thaliana
ttctggtccaaatgagc

SEQ ID NO: 163575 - DNA, 17 bp, Arabidopsis thaliana
ttctggtgaataaggag

SEQ ID NO: 163576 - DNA, 17 bp, Arabidopsis thaliana
ttctggtgagattattt

SEQ ID NO: 163577 - DNA, 17 bp, Arabidopsis thaliana
ttctggtgattttggtc

SEQ ID NO: 163578 - DNA, 17 bp, Arabidopsis thaliana
ttctggtggtcacagac

SEQ ID NO: 163579 - DNA, 17 bp, Arabidopsis thaliana
ttctggttaccggactt

SEQ ID NO: 163580 - DNA, 17 bp, Arabidopsis thaliana
ttctggttccaaattag

SEQ ID NO: 163581 - DNA, 17 bp, Arabidopsis thaliana
ttctggttctgatgtcg

SEQ ID NO: 163582 - DNA, 17 bp, Arabidopsis thaliana
ttctggtttcgcgaagt

SEQ ID NO: 163583 - DNA, 17 bp, Arabidopsis thaliana
ttctggtttgtgcgttt

SEQ ID NO: 163584 - DNA, 17 bp, Arabidopsis thaliana
ttctggttttgctcgat

SEQ ID NO: 163585 - DNA, 17 bp, Arabidopsis thaliana
ttctggttttggctgta

SEQ ID NO: 163586 - DNA, 17 bp, Arabidopsis thaliana
ttctgtaatcttgaggt

SEQ ID NO: 163587 - DNA, 17 bp, Arabidopsis thaliana
ttctgtactttcggttt

SEQ ID NO: 163588 - DNA, 17 bp, Arabidopsis thaliana
ttctgtaggcggtctct

SEQ ID NO: 163589 - DNA, 17 bp, Arabidopsis thaliana
ttctgtagggtcttcag

SEQ ID NO: 163590 - DNA, 17 bp, Arabidopsis thaliana
ttctgtagtccggtcgc

SEQ ID NO: 163591 - DNA, 17 bp, Arabidopsis thaliana
ttctgtatcagctccag

SEQ ID NO: 163592 - DNA, 17 bp, Arabidopsis thaliana
ttctgtattttcaggtt

SEQ ID NO: 163593 - DNA, 17 bp, Arabidopsis thaliana
ttctgtcaaccaagcaa

SEQ ID NO: 163594 - DNA, 17 bp, Arabidopsis thaliana
ttctgtcaaccaagcgc

SEQ ID NO: 163595 - DNA, 17 bp, Arabidopsis thaliana
ttctgtcaacccgaagc

SEQ ID NO: 163596 - DNA, 17 bp, Arabidopsis thaliana
ttctgtcagttgggatt

SEQ ID NO: 163597 - DNA, 17 bp, Arabidopsis thaliana
ttctgtcattagcagcg

SEQ ID NO: 163598 - DNA, 17 bp, Arabidopsis thaliana
ttctgtccagaattgtt

SEQ ID NO: 163599 - DNA, 17 bp, Arabidopsis thaliana
ttctgtccatacggccg

SEQ ID NO: 163600 - DNA, 17 bp, Arabidopsis thaliana
ttctgtccatacggcgg

SEQ ID NO: 163601 - DNA, 17 bp, Arabidopsis thaliana
ttctgtcgatcttgggc

SEQ ID NO: 163602 - DNA, 17 bp, Arabidopsis thaliana
ttctgtcgtttacggtg

SEQ ID NO: 163603 - DNA, 17 bp, Arabidopsis thaliana
ttctgtctctactactt

SEQ ID NO: 163604 - DNA, 17 bp, Arabidopsis thaliana
ttctgtctgcggttcga

SEQ ID NO: 163605 - DNA, 17 bp, Arabidopsis thaliana
ttctgtctgttactcga

SEQ ID NO: 163606 - DNA, 17 bp, Arabidopsis thaliana
ttctgtgacaatttgtc

SEQ ID NO: 163607 - DNA, 17 bp, Arabidopsis thaliana
ttctgtgcattggtcgg

SEQ ID NO: 163608 - DNA, 17 bp, Arabidopsis thaliana
ttctgtgtcgcctaatt

SEQ ID NO: 163609 - DNA, 17 bp, Arabidopsis thaliana
ttctgttcgacgaagtc

SEQ ID NO: 163610 - DNA, 17 bp, Arabidopsis thaliana
ttctgttcgagggattc

SEQ ID NO: 163611 - DNA, 17 bp, Arabidopsis thaliana
ttctgttctgggccgca

SEQ ID NO: 163612 - DNA, 17 bp, Arabidopsis thaliana
ttctgttgggttgttgc

SEQ ID NO: 163613 - DNA, 17 bp, Arabidopsis thaliana
ttctgtttacggcccgg

SEQ ID NO: 163614 - DNA, 17 bp, Arabidopsis thaliana
ttctgtttatccaggtg

SEQ ID NO: 163615 - DNA, 17 bp, Arabidopsis thaliana
ttctgtttcatctatcg

SEQ ID NO: 163616 - DNA, 17 bp, Arabidopsis thaliana
ttctgtttgcgacagtg

SEQ ID NO: 163617 - DNA, 17 bp, Arabidopsis thaliana
ttcttaacacaggactt

SEQ ID NO: 163618 - DNA, 17 bp, Arabidopsis thaliana
ttcttaagaaactagcc

SEQ ID NO: 163619 - DNA, 17 bp, Arabidopsis thaliana
ttcttaagcgagagccg

SEQ ID NO: 163620 - DNA, 17 bp, Arabidopsis thaliana
ttcttacacatcaaact

SEQ ID NO: 163621 - DNA, 17 bp, Arabidopsis thaliana
ttcttaccaaggttcaa

SEQ ID NO: 163622 - DNA, 17 bp, Arabidopsis thaliana
ttcttaccgattgtgtc

SEQ ID NO: 163623 - DNA, 17 bp, Arabidopsis thaliana
ttcttacgatgtctgcg

SEQ ID NO: 163624 - DNA, 17 bp, Arabidopsis thaliana
ttcttacttaaggacca

SEQ ID NO: 163625 - DNA, 17 bp, Arabidopsis thaliana
ttcttagagggactatg

SEQ ID NO: 163626 - DNA, 17 bp, Arabidopsis thaliana
ttcttagccgcttgtga

SEQ ID NO: 163627 - DNA, 17 bp, Arabidopsis thaliana
ttcttagctgcctacag

SEQ ID NO: 163628 - DNA, 17 bp, Arabidopsis thaliana
ttcttaggagtttggat

SEQ ID NO: 163629 - DNA, 17 bp, Arabidopsis thaliana
ttcttaggtgatcaccc

SEQ ID NO: 163630 - DNA, 17 bp, Arabidopsis thaliana
ttcttagtccatcctgt

SEQ ID NO: 163631 - DNA, 17 bp, Arabidopsis thaliana
ttcttagtcgatcctct

SEQ ID NO: 163632 - DNA, 17 bp, Arabidopsis thaliana
ttcttagtcgatcctgt

SEQ ID NO: 163633 - DNA, 17 bp, Arabidopsis thaliana
ttcttagtcgatccttt

SEQ ID NO: 163634 - DNA, 17 bp, Arabidopsis thaliana
ttcttagtcgcacctgt

SEQ ID NO: 163635 - DNA, 17 bp, Arabidopsis thaliana
ttcttagtcggtggagc

SEQ ID NO: 163636 - DNA, 17 bp, Arabidopsis thaliana
ttcttagttggtggagc

SEQ ID NO: 163637 - DNA, 17 bp, Arabidopsis thaliana
ttcttatcaagggactc

SEQ ID NO: 163638 - DNA, 17 bp, Arabidopsis thaliana
ttcttatcagaccgctt

SEQ ID NO: 163639 - DNA, 17 bp, Arabidopsis thaliana
ttcttatgttgcagctg

SEQ ID NO: 163640 - DNA, 17 bp, Arabidopsis thaliana
ttcttattcccgctaga

SEQ ID NO: 163641 - DNA, 17 bp, Arabidopsis thaliana
ttcttattgattcgatg

SEQ ID NO: 163642 - DNA, 17 bp, Arabidopsis thaliana
ttcttattggcgcctat

SEQ ID NO: 163643 - DNA, 17 bp, Arabidopsis thaliana
ttcttcaaacggtgctt

SEQ ID NO: 163644 - DNA, 17 bp, Arabidopsis thaliana
ttcttcaactggtacga

SEQ ID NO: 163645 - DNA, 17 bp, Arabidopsis thaliana
ttcttcaagagactgca

SEQ ID NO: 163646 - DNA, 17 bp, Arabidopsis thaliana
ttcttcacacgcttcca

SEQ ID NO: 163647 - DNA, 17 bp, Arabidopsis thaliana
ttcttcacatccaccgt

SEQ ID NO: 163648 - DNA, 17 bp, Arabidopsis thaliana
ttcttcaccaggtctga

SEQ ID NO: 163649 - DNA, 17 bp, Arabidopsis thaliana
ttcttcaccagtcgcca

SEQ ID NO: 163650 - DNA, 17 bp, Arabidopsis thaliana
ttcttcaccttttgact

SEQ ID NO: 163651 - DNA, 17 bp, Arabidopsis thaliana
ttcttcactacggccac

SEQ ID NO: 163652 - DNA, 17 bp, Arabidopsis thaliana
ttcttcactggtcggca

SEQ ID NO: 163653 - DNA, 17 bp, Arabidopsis thaliana
ttcttcagccaattgtg

SEQ ID NO: 163654 - DNA, 17 bp, Arabidopsis thaliana
ttcttcagctctactcg

SEQ ID NO: 163655 - DNA, 17 bp, Arabidopsis thaliana
ttcttcagctttcttga

SEQ ID NO: 163656 - DNA, 17 bp, Arabidopsis thaliana
ttcttcaggggctcagc

SEQ ID NO: 163657 - DNA, 17 bp, Arabidopsis thaliana
ttcttcagttttgctgc

SEQ ID NO: 163658 - DNA, 17 bp, Arabidopsis thaliana
ttcttcatccatcaacg

SEQ ID NO: 163659 - DNA, 17 bp, Arabidopsis thaliana
ttcttcatccatcaatg

SEQ ID NO: 163660 - DNA, 17 bp, Arabidopsis thaliana
ttcttcatctgaggtct

SEQ ID NO: 163661 - DNA, 17 bp, Arabidopsis thaliana
ttcttcatctgttgcac

SEQ ID NO: 163662 - DNA, 17 bp, Arabidopsis thaliana
ttcttcatcttcaacaa

SEQ ID NO: 163663 - DNA, 17 bp, Arabidopsis thaliana
ttcttcatcttcctcgc

SEQ ID NO: 163664 - DNA, 17 bp, Arabidopsis thaliana
ttcttcatgaggttacc

SEQ ID NO: 163665 - DNA, 17 bp, Arabidopsis thaliana
ttcttcatgcacagatg

SEQ ID NO: 163666 - DNA, 17 bp, Arabidopsis thaliana
ttcttccaacggtttca

SEQ ID NO: 163667 - DNA, 17 bp, Arabidopsis thaliana
ttcttccacaacatcat

SEQ ID NO: 163668 - DNA, 17 bp, Arabidopsis thaliana
ttcttccagccgtgggg

SEQ ID NO: 163669 - DNA, 17 bp, Arabidopsis thaliana
ttcttccagttagctcg

SEQ ID NO: 163670 - DNA, 17 bp, Arabidopsis thaliana
ttcttccatcgccggat

SEQ ID NO: 163671 - DNA, 17 bp, Arabidopsis thaliana
ttcttccatcttctgtt

SEQ ID NO: 163672 - DNA, 17 bp, Arabidopsis thaliana
ttcttcccaccctcacc

SEQ ID NO: 163673 - DNA, 17 bp, Arabidopsis thaliana
ttcttccccaacggcaa

SEQ ID NO: 163674 - DNA, 17 bp, Arabidopsis thaliana
ttcttccccagtggaat

SEQ ID NO: 163675 - DNA, 17 bp, Arabidopsis thaliana
ttcttcccggatttgct

SEQ ID NO: 163676 - DNA, 17 bp, Arabidopsis thaliana
ttcttcccggctggtgc

SEQ ID NO: 163677 - DNA, 17 bp, Arabidopsis thaliana
ttcttcccgttggtgtg

SEQ ID NO: 163678 - DNA, 17 bp, Arabidopsis thaliana
ttcttccctgtcgctct

SEQ ID NO: 163679 - DNA, 17 bp, Arabidopsis thaliana
ttcttccgagaatccaa

SEQ ID NO: 163680 - DNA, 17 bp, Arabidopsis thaliana
ttcttccgatgtgcctc

SEQ ID NO: 163681 - DNA, 17 bp, Arabidopsis thaliana
ttcttccgccgaccgga

SEQ ID NO: 163682 - DNA, 17 bp, Arabidopsis thaliana
ttcttccggcaggtcgg

SEQ ID NO: 163683 - DNA, 17 bp, Arabidopsis thaliana
ttcttccggttcgttaa

SEQ ID NO: 163684 - DNA, 17 bp, Arabidopsis thaliana
ttcttccggttctgagt

SEQ ID NO: 163685 - DNA, 17 bp, Arabidopsis thaliana
ttcttccggtttatgtt

SEQ ID NO: 163686 - DNA, 17 bp, Arabidopsis thaliana
ttcttccgtaatggatg

SEQ ID NO: 163687 - DNA, 17 bp, Arabidopsis thaliana
ttcttccgtcgttgcaa

SEQ ID NO: 163688 - DNA, 17 bp, Arabidopsis thaliana
ttcttccgtggtttgtt

SEQ ID NO: 163689 - DNA, 17 bp, Arabidopsis thaliana
ttcttccgttcttagct

SEQ ID NO: 163690 - DNA, 17 bp, Arabidopsis thaliana
ttcttccgtttctttcc

SEQ ID NO: 163691 - DNA, 17 bp, Arabidopsis thaliana
ttcttcctcgcagacct

SEQ ID NO: 163692 - DNA, 17 bp, Arabidopsis thaliana
ttcttcctctcgaaatc

SEQ ID NO: 163693 - DNA, 17 bp, Arabidopsis thaliana
ttcttcctgctgaagtc

SEQ ID NO: 163694 - DNA, 17 bp, Arabidopsis thaliana
ttcttcctgctttgcct

SEQ ID NO: 163695 - DNA, 17 bp, Arabidopsis thaliana
ttcttcctgggcagaat

SEQ ID NO: 163696 - DNA, 17 bp, Arabidopsis thaliana
ttcttcctttcgcagag

SEQ ID NO: 163697 - DNA, 17 bp, Arabidopsis thaliana
ttcttcctttgaggatc

SEQ ID NO: 163698 - DNA, 17 bp, Arabidopsis thaliana
ttcttcgaattaggaag

SEQ ID NO: 163699 - DNA, 17 bp, Arabidopsis thaliana
ttcttcgactgagaaag

SEQ ID NO: 163700 - DNA, 17 bp, Arabidopsis thaliana
ttcttcgatctcacatt

SEQ ID NO: 163701 - DNA, 17 bp, Arabidopsis thaliana
ttcttcgatggcctggg

SEQ ID NO: 163702 - DNA, 17 bp, Arabidopsis thaliana
ttcttcgatttgcagtg

SEQ ID NO: 163703 - DNA, 17 bp, Arabidopsis thaliana
ttcttcgcagaaacttt

SEQ ID NO: 163704 - DNA, 17 bp, Arabidopsis thaliana
ttcttcgcgagttcgag

SEQ ID NO: 163705 - DNA, 17 bp, Arabidopsis thaliana
ttcttcgctgacggatt

SEQ ID NO: 163706 - DNA, 17 bp, Arabidopsis thaliana
ttcttcggaagcactgc

SEQ ID NO: 163707 - DNA, 17 bp, Arabidopsis thaliana
ttcttcggacagggatt

SEQ ID NO: 163708 - DNA, 17 bp, Arabidopsis thaliana
ttcttcgggaacacagc

SEQ ID NO: 163709 - DNA, 17 bp, Arabidopsis thaliana
ttcttcgggagacgatg

SEQ ID NO: 163710 - DNA, 17 bp, Arabidopsis thaliana
ttcttcgggaggacgtg

SEQ ID NO: 163711 - DNA, 17 bp, Arabidopsis thaliana
ttcttcgggcgaagcca

SEQ ID NO: 163712 - DNA, 17 bp, Arabidopsis thaliana
ttcttcgggtcgtattt

SEQ ID NO: 163713 - DNA, 17 bp, Arabidopsis thaliana
ttcttcggtttacaggt

SEQ ID NO: 163714 - DNA, 17 bp, Arabidopsis thaliana
ttcttcggttttgtggc

SEQ ID NO: 163715 - DNA, 17 bp, Arabidopsis thaliana
ttcttcgtcaatgtccg

SEQ ID NO: 163716 - DNA, 17 bp, Arabidopsis thaliana
ttcttcgtctgtccctc

SEQ ID NO: 163717 - DNA, 17 bp, Arabidopsis thaliana
ttcttcgtctgttgcta

SEQ ID NO: 163718 - DNA, 17 bp, Arabidopsis thaliana
ttcttcgtcttcttcat

SEQ ID NO: 163719 - DNA, 17 bp, Arabidopsis thaliana
ttcttcgtgaatatctg

SEQ ID NO: 163720 - DNA, 17 bp, Arabidopsis thaliana
ttcttcgtggtgtagtt

SEQ ID NO: 163721 - DNA, 17 bp, Arabidopsis thaliana
ttcttcgttgttgctat

SEQ ID NO: 163722 - DNA, 17 bp, Arabidopsis thaliana
ttcttctaaaactctag

SEQ ID NO: 163723 - DNA, 17 bp, Arabidopsis thaliana
ttcttctaagccttagg

SEQ ID NO: 163724 - DNA, 17 bp, Arabidopsis thaliana
ttcttctacaagctgac

SEQ ID NO: 163725 - DNA, 17 bp, Arabidopsis thaliana
ttcttctacacgagttt

SEQ ID NO: 163726 - DNA, 17 bp, Arabidopsis thaliana
ttcttctacgtgtacga

SEQ ID NO: 163727 - DNA, 17 bp, Arabidopsis thaliana
ttcttctagggttccgg

SEQ ID NO: 163728 - DNA, 17 bp, Arabidopsis thaliana
ttcttctccaagtctgt

SEQ ID NO: 163729 - DNA, 17 bp, Arabidopsis thaliana
ttcttctccatgtgctt

SEQ ID NO: 163730 - DNA, 17 bp, Arabidopsis thaliana
ttcttctccgttgctat

SEQ ID NO: 163731 - DNA, 17 bp, Arabidopsis thaliana
ttcttctcgctgatcat

SEQ ID NO: 163732 - DNA, 17 bp, Arabidopsis thaliana
ttcttctctgggacgaa

SEQ ID NO: 163733 - DNA, 17 bp, Arabidopsis thaliana
ttcttctgaatttgcga

SEQ ID NO: 163734 - DNA, 17 bp, Arabidopsis thaliana
ttcttctgcaactgttg

SEQ ID NO: 163735 - DNA, 17 bp, Arabidopsis thaliana
ttcttctgcctcatcct

SEQ ID NO: 163736 - DNA, 17 bp, Arabidopsis thaliana
ttcttctgcttaagatc

SEQ ID NO: 163737 - DNA, 17 bp, Arabidopsis thaliana
ttcttctgtaacgccta

SEQ ID NO: 163738 - DNA, 17 bp, Arabidopsis thaliana
ttcttctgtcttgcgcg

SEQ ID NO: 163739 - DNA, 17 bp, Arabidopsis thaliana
ttcttctgtgatcaact

SEQ ID NO: 163740 - DNA, 17 bp, Arabidopsis thaliana
ttcttctgtgtaccaag

SEQ ID NO: 163741 - DNA, 17 bp, Arabidopsis thaliana
ttcttcttaggctgcgt

SEQ ID NO: 163742 - DNA, 17 bp, Arabidopsis thaliana
ttcttcttcaccttgcc

SEQ ID NO: 163743 - DNA, 17 bp, Arabidopsis thaliana
ttcttcttcagcctgcg

SEQ ID NO: 163744 - DNA, 17 bp, Arabidopsis thaliana
ttcttcttccggtttgt

SEQ ID NO: 163745 - DNA, 17 bp, Arabidopsis thaliana
ttcttcttcgggtatcc

SEQ ID NO: 163746 - DNA, 17 bp, Arabidopsis thaliana
ttcttcttcgttgccaa

SEQ ID NO: 163747 - DNA, 17 bp, Arabidopsis thaliana
ttcttcttcgttgctat

SEQ ID NO: 163748 - DNA, 17 bp, Arabidopsis thaliana
ttcttcttctcctcgca

SEQ ID NO: 163749 - DNA, 17 bp, Arabidopsis thaliana
ttcttcttctgcaactg

SEQ ID NO: 163750 - DNA, 17 bp, Arabidopsis thaliana
ttcttcttcttcgctgc

SEQ ID NO: 163751 - DNA, 17 bp, Arabidopsis thaliana
ttcttcttcttgcgtcg

SEQ ID NO: 163752 - DNA, 17 bp, Arabidopsis thaliana
ttcttctttgttgtcgc

SEQ ID NO: 163753 - DNA, 17 bp, Arabidopsis thaliana
ttcttctttgttgtcgg

SEQ ID NO: 163754 - DNA, 17 bp, Arabidopsis thaliana
ttcttcttttcgactgg

SEQ ID NO: 163755 - DNA, 17 bp, Arabidopsis thaliana
ttcttgaaatccatgaa

SEQ ID NO: 163756 - DNA, 17 bp, Arabidopsis thaliana
ttcttgaacttggttga

SEQ ID NO: 163757 - DNA, 17 bp, Arabidopsis thaliana
ttcttgaagtttgggct

SEQ ID NO: 163758 - DNA, 17 bp, Arabidopsis thaliana
ttcttgaccggatttag

SEQ ID NO: 163759 - DNA, 17 bp, Arabidopsis thaliana
ttcttgacctgaagaag

SEQ ID NO: 163760 - DNA, 17 bp, Arabidopsis thaliana
ttcttgaccttgcaagg

SEQ ID NO: 163761 - DNA, 17 bp, Arabidopsis thaliana
ttcttgaccttgtaaga

SEQ ID NO: 163762 - DNA, 17 bp, Arabidopsis thaliana
ttcttgaccttgtaagg

SEQ ID NO: 163763 - DNA, 17 bp, Arabidopsis thaliana
ttcttgactgtagaatg

SEQ ID NO: 163764 - DNA, 17 bp, Arabidopsis thaliana
ttcttgactttgagttt

SEQ ID NO: 163765 - DNA, 17 bp, Arabidopsis thaliana
ttcttgagaagtgcaat

SEQ ID NO: 163766 - DNA, 17 bp, Arabidopsis thaliana
ttcttgagcgacatgtt

SEQ ID NO: 163767 - DNA, 17 bp, Arabidopsis thaliana
ttcttgagcgtatcaac

SEQ ID NO: 163768 - DNA, 17 bp, Arabidopsis thaliana
ttcttgatcacgagttg

SEQ ID NO: 163769 - DNA, 17 bp, Arabidopsis thaliana
ttcttgatctttgactc

SEQ ID NO: 163770 - DNA, 17 bp, Arabidopsis thaliana
ttcttgattgacaaatt

SEQ ID NO: 163771 - DNA, 17 bp, Arabidopsis thaliana
ttcttgattgatgaaac

SEQ ID NO: 163772 - DNA, 17 bp, Arabidopsis thaliana
ttcttgcaagggagtgc

SEQ ID NO: 163773 - DNA, 17 bp, Arabidopsis thaliana
ttcttgcaagggagttc

SEQ ID NO: 163774 - DNA, 17 bp, Arabidopsis thaliana
ttcttgcacctagggca

SEQ ID NO: 163775 - DNA, 17 bp, Arabidopsis thaliana
ttcttgcagacgacgct

SEQ ID NO: 163776 - DNA, 17 bp, Arabidopsis thaliana
ttcttgcagcgttgttt

SEQ ID NO: 163777 - DNA, 17 bp, Arabidopsis thaliana
ttcttgcagtcattcca

SEQ ID NO: 163778 - DNA, 17 bp, Arabidopsis thaliana
ttcttgcctgagccctg

SEQ ID NO: 163779 - DNA, 17 bp, Arabidopsis thaliana
ttcttgcgacagatcag

SEQ ID NO: 163780 - DNA, 17 bp, Arabidopsis thaliana
ttcttgcgacctgctgg

SEQ ID NO: 163781 - DNA, 17 bp, Arabidopsis thaliana
ttcttgcgctcgtaata

SEQ ID NO: 163782 - DNA, 17 bp, Arabidopsis thaliana
ttcttgcggcggttgct

SEQ ID NO: 163783 - DNA, 17 bp, Arabidopsis thaliana
ttcttgcgtttcaggaa

SEQ ID NO: 163784 - DNA, 17 bp, Arabidopsis thaliana
ttcttggaaaactgtcg

SEQ ID NO: 163785 - DNA, 17 bp, Arabidopsis thaliana
ttcttggaacgctcttg

SEQ ID NO: 163786 - DNA, 17 bp, Arabidopsis thaliana
ttcttggaagccattgt

SEQ ID NO: 163787 - DNA, 17 bp, Arabidopsis thaliana
ttcttggaccggttggt

SEQ ID NO: 163788 - DNA, 17 bp, Arabidopsis thaliana
ttcttggactgacgaca

SEQ ID NO: 163789 - DNA, 17 bp, Arabidopsis thaliana
ttcttggagttgtgcga

SEQ ID NO: 163790 - DNA, 17 bp, Arabidopsis thaliana
ttcttggatttatgaaa

SEQ ID NO: 163791 - DNA, 17 bp, Arabidopsis thaliana
ttcttggcagaaacttt

SEQ ID NO: 163792 - DNA, 17 bp, Arabidopsis thaliana
ttcttggcgtgcagtga

SEQ ID NO: 163793 - DNA, 17 bp, Arabidopsis thaliana
ttcttgggctttaggtc

SEQ ID NO: 163794 - DNA, 17 bp, Arabidopsis thaliana
ttcttggtcctccgcag

SEQ ID NO: 163795 - DNA, 17 bp, Arabidopsis thaliana
ttcttggttcgggctgt

SEQ ID NO: 163796 - DNA, 17 bp, Arabidopsis thaliana
ttcttgtcatagaccca

SEQ ID NO: 163797 - DNA, 17 bp, Arabidopsis thaliana
ttcttgtccaagctttt

SEQ ID NO: 163798 - DNA, 17 bp, Arabidopsis thaliana
ttcttgtgaacttgacc

SEQ ID NO: 163799 - DNA, 17 bp, Arabidopsis thaliana
ttcttgtgactagccgc

SEQ ID NO: 163800 - DNA, 17 bp, Arabidopsis thaliana
ttcttgtgactatcccc

SEQ ID NO: 163801 - DNA, 17 bp, Arabidopsis thaliana
ttcttgtgtgactaatt

SEQ ID NO: 163802 - DNA, 17 bp, Arabidopsis thaliana
ttcttgttgtttcttga

SEQ ID NO: 163803 - DNA, 17 bp, Arabidopsis thaliana
ttctttacccgtcccgt

SEQ ID NO: 163804 - DNA, 17 bp, Arabidopsis thaliana
ttctttacgaagacaac

SEQ ID NO: 163805 - DNA, 17 bp, Arabidopsis thaliana
ttctttatcaacggctt

SEQ ID NO: 163806 - DNA, 17 bp, Arabidopsis thaliana
ttctttatccatgtggt

SEQ ID NO: 163807 - DNA, 17 bp, Arabidopsis thaliana
ttctttatccgtcccgt

SEQ ID NO: 163808 - DNA, 17 bp, Arabidopsis thaliana
ttctttcaaggttgcaa

SEQ ID NO: 163809 - DNA, 17 bp, Arabidopsis thaliana
ttctttcacgtcgggtt

SEQ ID NO: 163810 - DNA, 17 bp, Arabidopsis thaliana
ttctttcagcgtcggct

SEQ ID NO: 163811 - DNA, 17 bp, Arabidopsis thaliana
ttctttcaggaccactg

SEQ ID NO: 163812 - DNA, 17 bp, Arabidopsis thaliana
ttctttcatctaggccc

SEQ ID NO: 163813 - DNA, 17 bp, Arabidopsis thaliana
ttctttccaacacacga

SEQ ID NO: 163814 - DNA, 17 bp, Arabidopsis thaliana
ttctttccatcgccgga

SEQ ID NO: 163815 - DNA, 17 bp, Arabidopsis thaliana
ttctttcccggctggtg

SEQ ID NO: 163816 - DNA, 17 bp, Arabidopsis thaliana
ttctttccgacctttat

SEQ ID NO: 163817 - DNA, 17 bp, Arabidopsis thaliana
ttctttcctcagttgtg

SEQ ID NO: 163818 - DNA, 17 bp, Arabidopsis thaliana
ttctttcgaaggactgg

SEQ ID NO: 163819 - DNA, 17 bp, Arabidopsis thaliana
ttctttcgaggaagact

SEQ ID NO: 163820 - DNA, 17 bp, Arabidopsis thaliana
ttctttcgccgttttgc

SEQ ID NO: 163821 - DNA, 17 bp, Arabidopsis thaliana
ttctttcgtcggagggc

SEQ ID NO: 163822 - DNA, 17 bp, Arabidopsis thaliana
ttctttctctaaaaccg

SEQ ID NO: 163823 - DNA, 17 bp, Arabidopsis thaliana
ttctttcttcggttgtg

SEQ ID NO: 163824 - DNA, 17 bp, Arabidopsis thaliana
ttctttcttcggttgtt

SEQ ID NO: 163825 - DNA, 17 bp, Arabidopsis thaliana
ttctttcttctgcgaga

SEQ ID NO: 163826 - DNA, 17 bp, Arabidopsis thaliana
ttctttgaaacgttcag

SEQ ID NO: 163827 - DNA, 17 bp, Arabidopsis thaliana
ttctttgaaagctccgt

SEQ ID NO: 163828 - DNA, 17 bp, Arabidopsis thaliana
ttctttgaaagtgccta

SEQ ID NO: 163829 - DNA, 17 bp, Arabidopsis thaliana
ttctttgaatcgtaagg

SEQ ID NO: 163830 - DNA, 17 bp, Arabidopsis thaliana
ttctttgacacaggtat

SEQ ID NO: 163831 - DNA, 17 bp, Arabidopsis thaliana
ttctttgaccttgggtg

SEQ ID NO: 163832 - DNA, 17 bp, Arabidopsis thaliana
ttctttgagctgcgatt

SEQ ID NO: 163833 - DNA, 17 bp, Arabidopsis thaliana
ttctttgagttagtgga

SEQ ID NO: 163834 - DNA, 17 bp, Arabidopsis thaliana
ttctttgatcagtatgg

SEQ ID NO: 163835 - DNA, 17 bp, Arabidopsis thaliana
ttctttgatctaaggcc

SEQ ID NO: 163836 - DNA, 17 bp, Arabidopsis thaliana
ttctttgattgatcgct

SEQ ID NO: 163837 - DNA, 17 bp, Arabidopsis thaliana
ttctttgcaataacgct

SEQ ID NO: 163838 - DNA, 17 bp, Arabidopsis thaliana
ttctttgcagagaaact

SEQ ID NO: 163839 - DNA, 17 bp, Arabidopsis thaliana
ttctttgccctcaggta

SEQ ID NO: 163840 - DNA, 17 bp, Arabidopsis thaliana
ttctttgcccttttgca

SEQ ID NO: 163841 - DNA, 17 bp, Arabidopsis thaliana
ttctttgccgttggacc

SEQ ID NO: 163842 - DNA, 17 bp, Arabidopsis thaliana
ttctttgcgatttactg

SEQ ID NO: 163843 - DNA, 17 bp, Arabidopsis thaliana
ttctttgcgggagattc

SEQ ID NO: 163844 - DNA, 17 bp, Arabidopsis thaliana
ttctttgctatgccgct

SEQ ID NO: 163845 - DNA, 17 bp, Arabidopsis thaliana
ttctttggaagccattg

SEQ ID NO: 163846 - DNA, 17 bp, Arabidopsis thaliana
ttctttggaccacactt

SEQ ID NO: 163847 - DNA, 17 bp, Arabidopsis thaliana
ttctttggcacgcttta

SEQ ID NO: 163848 - DNA, 17 bp, Arabidopsis thaliana
ttctttggccctgctgt

SEQ ID NO: 163849 - DNA, 17 bp, Arabidopsis thaliana
ttctttgggtgacgccg

SEQ ID NO: 163850 - DNA, 17 bp, Arabidopsis thaliana
ttctttggtccaagcga

SEQ ID NO: 163851 - DNA, 17 bp, Arabidopsis thaliana
ttctttgtccacggtag

SEQ ID NO: 163852 - DNA, 17 bp, Arabidopsis thaliana
ttctttgtccgttacta

SEQ ID NO: 163853 - DNA, 17 bp, Arabidopsis thaliana
ttctttgtccgttgcta

SEQ ID NO: 163854 - DNA, 17 bp, Arabidopsis thaliana
ttctttgtccgttgctt

SEQ ID NO: 163855 - DNA, 17 bp, Arabidopsis thaliana
ttctttgtcgctaagat

SEQ ID NO: 163856 - DNA, 17 bp, Arabidopsis thaliana
ttctttgtcgctttgca

SEQ ID NO: 163857 - DNA, 17 bp, Arabidopsis thaliana
ttctttgtcgttgctat

SEQ ID NO: 163858 - DNA, 17 bp, Arabidopsis thaliana
ttctttgtgccataacc

SEQ ID NO: 163859 - DNA, 17 bp, Arabidopsis thaliana
ttctttgtggaggccta

SEQ ID NO: 163860 - DNA, 17 bp, Arabidopsis thaliana
ttctttgttgtggccgg

SEQ ID NO: 163861 - DNA, 17 bp, Arabidopsis thaliana
ttcttttacgtggggga

SEQ ID NO: 163862 - DNA, 17 bp, Arabidopsis thaliana
ttcttttatgctatagc

SEQ ID NO: 163863 - DNA, 17 bp, Arabidopsis thaliana
ttcttttcaggtgaagg

SEQ ID NO: 163864 - DNA, 17 bp, Arabidopsis thaliana
ttcttttcctcagtagg

SEQ ID NO: 163865 - DNA, 17 bp, Arabidopsis thaliana
ttcttttctaatcatgt

SEQ ID NO: 163866 - DNA, 17 bp, Arabidopsis thaliana
ttcttttcttcagcttt

SEQ ID NO: 163867 - DNA, 17 bp, Arabidopsis thaliana
ttcttttcttgggatcg

SEQ ID NO: 163868 - DNA, 17 bp, Arabidopsis thaliana
ttcttttgacatccggt

SEQ ID NO: 163869 - DNA, 17 bp, Arabidopsis thaliana
ttcttttgatacgcttg

SEQ ID NO: 163870 - DNA, 17 bp, Arabidopsis thaliana
ttcttttgatgattttg

SEQ ID NO: 163871 - DNA, 17 bp, Arabidopsis thaliana
ttcttttgtcttgaggc

SEQ ID NO: 163872 - DNA, 17 bp, Arabidopsis thaliana
ttcttttgttgatcgct

SEQ ID NO: 163873 - DNA, 17 bp, Arabidopsis thaliana
ttcttttgttgttgaca

SEQ ID NO: 163874 - DNA, 17 bp, Arabidopsis thaliana
ttcttttgtttccgctc

SEQ ID NO: 163875 - DNA, 17 bp, Arabidopsis thaliana
ttctttttcccggctgg

SEQ ID NO: 163876 - DNA, 17 bp, Arabidopsis thaliana
ttctttttgaatccgca

SEQ ID NO: 163877 - DNA, 17 bp, Arabidopsis thaliana
ttcttttttggaaagtc

SEQ ID NO: 163878 - DNA, 17 bp, Arabidopsis thaliana
ttgaaaaacttatggag

SEQ ID NO: 163879 - DNA, 17 bp, Arabidopsis thaliana
ttgaaaacgaaccgcat

SEQ ID NO: 163880 - DNA, 17 bp, Arabidopsis thaliana
ttgaaaacggtctaact

SEQ ID NO: 163881 - DNA, 17 bp, Arabidopsis thaliana
ttgaaaactcactcttc

SEQ ID NO: 163882 - DNA, 17 bp, Arabidopsis thaliana
ttgaaaactttttcgac

SEQ ID NO: 163883 - DNA, 17 bp, Arabidopsis thaliana
ttgaaaatccggaggac

SEQ ID NO: 163884 - DNA, 17 bp, Arabidopsis thaliana
ttgaaaattacgggttt

SEQ ID NO: 163885 - DNA, 17 bp, Arabidopsis thaliana
ttgaaacgcaccgcatt

SEQ ID NO: 163886 - DNA, 17 bp, Arabidopsis thaliana
ttgaaacgtttctaaac

SEQ ID NO: 163887 - DNA, 17 bp, Arabidopsis thaliana
ttgaaactctttctagg

SEQ ID NO: 163888 - DNA, 17 bp, Arabidopsis thaliana
ttgaaactgtaagccgg

SEQ ID NO: 163889 - DNA, 17 bp, Arabidopsis thaliana
ttgaaagagtgcgtaat

SEQ ID NO: 163890 - DNA, 17 bp, Arabidopsis thaliana
ttgaaagtgacgatgaa

SEQ ID NO: 163891 - DNA, 17 bp, Arabidopsis thaliana
ttgaaagtgacgatgga

SEQ ID NO: 163892 - DNA, 17 bp, Arabidopsis thaliana
ttgaaagtgactacata

SEQ ID NO: 163893 - DNA, 17 bp, Arabidopsis thaliana
ttgaaagtgactacatc

SEQ ID NO: 163894 - DNA, 17 bp, Arabidopsis thaliana
ttgaaagtgactacgtc

SEQ ID NO: 163895 - DNA, 17 bp, Arabidopsis thaliana
ttgaaatcgtcgaccag

SEQ ID NO: 163896 - DNA, 17 bp, Arabidopsis thaliana
ttgaaatctggcgattt

SEQ ID NO: 163897 - DNA, 17 bp, Arabidopsis thaliana
ttgaaatcttcgtcgcg

SEQ ID NO: 163898 - DNA, 17 bp, Arabidopsis thaliana
ttgaaatgcttttcgac

SEQ ID NO: 163899 - DNA, 17 bp, Arabidopsis thaliana
ttgaaatttcatcgtga

SEQ ID NO: 163900 - DNA, 17 bp, Arabidopsis thaliana
ttgaacatcttgttgac

SEQ ID NO: 163901 - DNA, 17 bp, Arabidopsis thaliana
ttgaacatgtttaggca

SEQ ID NO: 163902 - DNA, 17 bp, Arabidopsis thaliana
ttgaaccacgggtcgat

SEQ ID NO: 163903 - DNA, 17 bp, Arabidopsis thaliana
ttgaaccagaagctcct

SEQ ID NO: 163904 - DNA, 17 bp, Arabidopsis thaliana
ttgaaccagcgacttct

SEQ ID NO: 163905 - DNA, 17 bp, Arabidopsis thaliana
ttgaacccacttgtgac

SEQ ID NO: 163906 - DNA, 17 bp, Arabidopsis thaliana
ttgaacccagtacctcc

SEQ ID NO: 163907 - DNA, 17 bp, Arabidopsis thaliana
ttgaacccgccgagtgt

SEQ ID NO: 163908 - DNA, 17 bp, Arabidopsis thaliana
ttgaacccgggcgaagc

SEQ ID NO: 163909 - DNA, 17 bp, Arabidopsis thaliana
ttgaaccgaaccgcatt

SEQ ID NO: 163910 - DNA, 17 bp, Arabidopsis thaliana
ttgaaccgattgatgtg

SEQ ID NO: 163911 - DNA, 17 bp, Arabidopsis thaliana
ttgaaccgattggatgt

SEQ ID NO: 163912 - DNA, 17 bp, Arabidopsis thaliana
ttgaaccgcaccgcact

SEQ ID NO: 163913 - DNA, 17 bp, Arabidopsis thaliana
ttgaaccgcatttgtac

SEQ ID NO: 163914 - DNA, 17 bp, Arabidopsis thaliana
ttgaaccggacagtgcg

SEQ ID NO: 163915 - DNA, 17 bp, Arabidopsis thaliana
ttgaaccggatcgcact

SEQ ID NO: 163916 - DNA, 17 bp, Arabidopsis thaliana
ttgaaccggctgggtga

SEQ ID NO: 163917 - DNA, 17 bp, Arabidopsis thaliana
ttgaaccggctgggtgt

SEQ ID NO: 163918 - DNA, 17 bp, Arabidopsis thaliana
ttgaaccggtgacctat

SEQ ID NO: 163919 - DNA, 17 bp, Arabidopsis thaliana
ttgaaccttgggatgga

SEQ ID NO: 163920 - DNA, 17 bp, Arabidopsis thaliana
ttgaaccttgggatggg

SEQ ID NO: 163921 - DNA, 17 bp, Arabidopsis thaliana
ttgaaccttgggatggt

SEQ ID NO: 163922 - DNA, 17 bp, Arabidopsis thaliana
ttgaacgaaacttgggt

SEQ ID NO: 163923 - DNA, 17 bp, Arabidopsis thaliana
ttgaacgaacccatctg

SEQ ID NO: 163924 - DNA, 17 bp, Arabidopsis thaliana
ttgaacgactggtcgag

SEQ ID NO: 163925 - DNA, 17 bp, Arabidopsis thaliana
ttgaacgactggttgaa

SEQ ID NO: 163926 - DNA, 17 bp, Arabidopsis thaliana
ttgaacgactggttgag

SEQ ID NO: 163927 - DNA, 17 bp, Arabidopsis thaliana
ttgaacgactgtttttg

SEQ ID NO: 163928 - DNA, 17 bp, Arabidopsis thaliana
ttgaacgcaagttgcgc

SEQ ID NO: 163929 - DNA, 17 bp, Arabidopsis thaliana
ttgaacgcaagttgggc

SEQ ID NO: 163930 - DNA, 17 bp, Arabidopsis thaliana
ttgaacgggcttgatta

SEQ ID NO: 163931 - DNA, 17 bp, Arabidopsis thaliana
ttgaactaggaggaaag

SEQ ID NO: 163932 - DNA, 17 bp, Arabidopsis thaliana
ttgaactaggatgagat

SEQ ID NO: 163933 - DNA, 17 bp, Arabidopsis thaliana
ttgaactatcgggacct

SEQ ID NO: 163934 - DNA, 17 bp, Arabidopsis thaliana
ttgaactcccacaagat

SEQ ID NO: 163935 - DNA, 17 bp, Arabidopsis thaliana
ttgaactctgtcatcca

SEQ ID NO: 163936 - DNA, 17 bp, Arabidopsis thaliana
ttgaactcttcgtcgcg

SEQ ID NO: 163937 - DNA, 17 bp, Arabidopsis thaliana
ttgaactgaagggagct

SEQ ID NO: 163938 - DNA, 17 bp, Arabidopsis thaliana
ttgaactgcaccgcact

SEQ ID NO: 163939 - DNA, 17 bp, Arabidopsis thaliana
ttgaactgctgctgaat

SEQ ID NO: 163940 - DNA, 17 bp, Arabidopsis thaliana
ttgaactgcttgtggat

SEQ ID NO: 163941 - DNA, 17 bp, Arabidopsis thaliana
ttgaacttcttgaccgg

SEQ ID NO: 163942 - DNA, 17 bp, Arabidopsis thaliana
ttgaactttcagatttt

SEQ ID NO: 163943 - DNA, 17 bp, Arabidopsis thaliana
ttgaagaagacttggaa

SEQ ID NO: 163944 - DNA, 17 bp, Arabidopsis thaliana
ttgaagaatgaaccggc

SEQ ID NO: 163945 - DNA, 17 bp, Arabidopsis thaliana
ttgaagaattccgtgcg

SEQ ID NO: 163946 - DNA, 17 bp, Arabidopsis thaliana
ttgaagacgacaaccga

SEQ ID NO: 163947 - DNA, 17 bp, Arabidopsis thaliana
ttgaagacgggcgttgc

SEQ ID NO: 163948 - DNA, 17 bp, Arabidopsis thaliana
ttgaagacttgatgaac

SEQ ID NO: 163949 - DNA, 17 bp, Arabidopsis thaliana
ttgaagaggaattggaa

SEQ ID NO: 163950 - DNA, 17 bp, Arabidopsis thaliana
ttgaagaggacctggaa

SEQ ID NO: 163951 - DNA, 17 bp, Arabidopsis thaliana
ttgaagaggacttggaa

SEQ ID NO: 163952 - DNA, 17 bp, Arabidopsis thaliana
ttgaagaggacttggac

SEQ ID NO: 163953 - DNA, 17 bp, Arabidopsis thaliana
ttgaagaggagttggaa

SEQ ID NO: 163954 - DNA, 17 bp, Arabidopsis thaliana
ttgaagatccaaattca

SEQ ID NO: 163955 - DNA, 17 bp, Arabidopsis thaliana
ttgaagatgaagattca

SEQ ID NO: 163956 - DNA, 17 bp, Arabidopsis thaliana
ttgaagattatctcttc

SEQ ID NO: 163957 - DNA, 17 bp, Arabidopsis thaliana
ttgaagcaagtacggcc

SEQ ID NO: 163958 - DNA, 17 bp, Arabidopsis thaliana
ttgaagccaccttttca

SEQ ID NO: 163959 - DNA, 17 bp, Arabidopsis thaliana
ttgaagccaccttttta

SEQ ID NO: 163960 - DNA, 17 bp, Arabidopsis thaliana
ttgaagctcggatttcc

SEQ ID NO: 163961 - DNA, 17 bp, Arabidopsis thaliana
ttgaaggagaaggttct

SEQ ID NO: 163962 - DNA, 17 bp, Arabidopsis thaliana
ttgaaggcacgtgtcgt

SEQ ID NO: 163963 - DNA, 17 bp, Arabidopsis thaliana
ttgaaggctacagagtc

SEQ ID NO: 163964 - DNA, 17 bp, Arabidopsis thaliana
ttgaaggctgatcatga

SEQ ID NO: 163965 - DNA, 17 bp, Arabidopsis thaliana
ttgaagggaccgtcgcc

SEQ ID NO: 163966 - DNA, 17 bp, Arabidopsis thaliana
ttgaaggtcgcgattct

SEQ ID NO: 163967 - DNA, 17 bp, Arabidopsis thaliana
ttgaaggtcgcgatttt

SEQ ID NO: 163968 - DNA, 17 bp, Arabidopsis thaliana
ttgaaggtgtccatcaa

SEQ ID NO: 163969 - DNA, 17 bp, Arabidopsis thaliana
ttgaagtccctcctgcc

SEQ ID NO: 163970 - DNA, 17 bp, Arabidopsis thaliana
ttgaagtccgaggtgtt

SEQ ID NO: 163971 - DNA, 17 bp, Arabidopsis thaliana
ttgaagtctctgcctcc

SEQ ID NO: 163972 - DNA, 17 bp, Arabidopsis thaliana
ttgaagtgactacatcg

SEQ ID NO: 163973 - DNA, 17 bp, Arabidopsis thaliana
ttgaataaatttgccat

SEQ ID NO: 163974 - DNA, 17 bp, Arabidopsis thaliana
ttgaatattacaatatt

SEQ ID NO: 163975 - DNA, 17 bp, Arabidopsis thaliana
ttgaatattaccggatc

SEQ ID NO: 163976 - DNA, 17 bp, Arabidopsis thaliana
ttgaatattcggcccag

SEQ ID NO: 163977 - DNA, 17 bp, Arabidopsis thaliana
ttgaatcactagccact

SEQ ID NO: 163978 - DNA, 17 bp, Arabidopsis thaliana
ttgaatccgtttttcct

SEQ ID NO: 163979 - DNA, 17 bp, Arabidopsis thaliana
ttgaatcctacttggga

SEQ ID NO: 163980 - DNA, 17 bp, Arabidopsis thaliana
ttgaatgaccggcattt

SEQ ID NO: 163981 - DNA, 17 bp, Arabidopsis thaliana
ttgaatgatccggtgaa

SEQ ID NO: 163982 - DNA, 17 bp, Arabidopsis thaliana
ttgaatggctctatgcg

SEQ ID NO: 163983 - DNA, 17 bp, Arabidopsis thaliana
ttgaatggttacagcga

SEQ ID NO: 163984 - DNA, 17 bp, Arabidopsis thaliana
ttgaatggttacagcgg

SEQ ID NO: 163985 - DNA, 17 bp, Arabidopsis thaliana
ttgaatggttacagcgt

SEQ ID NO: 163986 - DNA, 17 bp, Arabidopsis thaliana
ttgacaaacctactcaa

SEQ ID NO: 163987 - DNA, 17 bp, Arabidopsis thaliana
ttgacaacaacgagctg

SEQ ID NO: 163988 - DNA, 17 bp, Arabidopsis thaliana
ttgacaacaccaaattt

SEQ ID NO: 163989 - DNA, 17 bp, Arabidopsis thaliana
ttgacaacttagtgtcc

SEQ ID NO: 163990 - DNA, 17 bp, Arabidopsis thaliana
ttgacaagggttcgctg

SEQ ID NO: 163991 - DNA, 17 bp, Arabidopsis thaliana
ttgacaaggtacgattg

SEQ ID NO: 163992 - DNA, 17 bp, Arabidopsis thaliana
ttgacaatcgccggtcc

SEQ ID NO: 163993 - DNA, 17 bp, Arabidopsis thaliana
ttgacaatcttaaggtc

SEQ ID NO: 163994 - DNA, 17 bp, Arabidopsis thaliana
ttgacaatggtatggac

SEQ ID NO: 163995 - DNA, 17 bp, Arabidopsis thaliana
ttgacaccgttagatga

SEQ ID NO: 163996 - DNA, 17 bp, Arabidopsis thaliana
ttgacacctctagtttt

SEQ ID NO: 163997 - DNA, 17 bp, Arabidopsis thaliana
ttgacacctttctgact

SEQ ID NO: 163998 - DNA, 17 bp, Arabidopsis thaliana
ttgacacggctcaatca

SEQ ID NO: 163999 - DNA, 17 bp, Arabidopsis thaliana
ttgacacgtggcacaat

SEQ ID NO: 164000 - DNA, 17 bp, Arabidopsis thaliana
ttgacacgtggcacgaa

SEQ ID NO: 164001 - DNA, 17 bp, Arabidopsis thaliana
ttgacacgtggcacgat

SEQ ID NO: 164002 - DNA, 17 bp, Arabidopsis thaliana
ttgacacgtggcacggt

SEQ ID NO: 164003 - DNA, 17 bp, Arabidopsis thaliana
ttgacacgtggtacgat

SEQ ID NO: 164004 - DNA, 17 bp, Arabidopsis thaliana
ttgacacgttgcacgat

SEQ ID NO: 164005 - DNA, 17 bp, Arabidopsis thaliana
ttgacagaagaaagaaa

SEQ ID NO: 164006 - DNA, 17 bp, Arabidopsis thaliana
ttgacagaagagagtga

SEQ ID NO: 164007 - DNA, 17 bp, Arabidopsis thaliana
ttgacagaagagggtaa

SEQ ID NO: 164008 - DNA, 17 bp, Arabidopsis thaliana
ttgacagactcctcgtt

SEQ ID NO: 164009 - DNA, 17 bp, Arabidopsis thaliana
ttgacagactgagagat

SEQ ID NO: 164010 - DNA, 17 bp, Arabidopsis thaliana
ttgacagactgagagcc

SEQ ID NO: 164011 - DNA, 17 bp, Arabidopsis thaliana
ttgacagactgagagct

SEQ ID NO: 164012 - DNA, 17 bp, Arabidopsis thaliana
ttgacagatccactcat

SEQ ID NO: 164013 - DNA, 17 bp, Arabidopsis thaliana
ttgacaggtctgcaatt

SEQ ID NO: 164014 - DNA, 17 bp, Arabidopsis thaliana
ttgacaggttctcacta

SEQ ID NO: 164015 - DNA, 17 bp, Arabidopsis thaliana
ttgacatatgcgcagcc

SEQ ID NO: 164016 - DNA, 17 bp, Arabidopsis thaliana
ttgacatcatcagccga

SEQ ID NO: 164017 - DNA, 17 bp, Arabidopsis thaliana
ttgacatcgccagtcaa

SEQ ID NO: 164018 - DNA, 17 bp, Arabidopsis thaliana
ttgacatcgggtttggc

SEQ ID NO: 164019 - DNA, 17 bp, Arabidopsis thaliana
ttgacatctgtcctcga

SEQ ID NO: 164020 - DNA, 17 bp, Arabidopsis thaliana
ttgacatgccgcgaatc

SEQ ID NO: 164021 - DNA, 17 bp, Arabidopsis thaliana
ttgacatggatttccca

SEQ ID NO: 164022 - DNA, 17 bp, Arabidopsis thaliana
ttgacatgtctcgaagc

SEQ ID NO: 164023 - DNA, 17 bp, Arabidopsis thaliana
ttgacatgtgcgcaccc

SEQ ID NO: 164024 - DNA, 17 bp, Arabidopsis thaliana
ttgacatgtgcgcagcc

SEQ ID NO: 164025 - DNA, 17 bp, Arabidopsis thaliana
ttgacatgtggcgattc

SEQ ID NO: 164026 - DNA, 17 bp, Arabidopsis thaliana
ttgacattgccatccac

SEQ ID NO: 164027 - DNA, 17 bp, Arabidopsis thaliana
ttgacattggcaccact

SEQ ID NO: 164028 - DNA, 17 bp, Arabidopsis thaliana
ttgacattttttggacc

SEQ ID NO: 164029 - DNA, 17 bp, Arabidopsis thaliana
ttgaccaacttttccat

SEQ ID NO: 164030 - DNA, 17 bp, Arabidopsis thaliana
ttgaccaatgcaccaac

SEQ ID NO: 164031 - DNA, 17 bp, Arabidopsis thaliana
ttgaccaatgcaccagc

SEQ ID NO: 164032 - DNA, 17 bp, Arabidopsis thaliana
ttgaccaatgtcaaggc

SEQ ID NO: 164033 - DNA, 17 bp, Arabidopsis thaliana
ttgaccactctaatcgc

SEQ ID NO: 164034 - DNA, 17 bp, Arabidopsis thaliana
ttgaccactctgtccgc

SEQ ID NO: 164035 - DNA, 17 bp, Arabidopsis thaliana
ttgaccactctgtctgc

SEQ ID NO: 164036 - DNA, 17 bp, Arabidopsis thaliana
ttgaccactgtacagcg

SEQ ID NO: 164037 - DNA, 17 bp, Arabidopsis thaliana
ttgaccacttagcttga

SEQ ID NO: 164038 - DNA, 17 bp, Arabidopsis thaliana
ttgaccagaatcaagct

SEQ ID NO: 164039 - DNA, 17 bp, Arabidopsis thaliana
ttgaccagactgtttcg

SEQ ID NO: 164040 - DNA, 17 bp, Arabidopsis thaliana
ttgaccagcagagttct

SEQ ID NO: 164041 - DNA, 17 bp, Arabidopsis thaliana
ttgaccagctcttgtcc

SEQ ID NO: 164042 - DNA, 17 bp, Arabidopsis thaliana
ttgaccaggaaggctta

SEQ ID NO: 164043 - DNA, 17 bp, Arabidopsis thaliana
ttgaccaggcttcattc

SEQ ID NO: 164044 - DNA, 17 bp, Arabidopsis thaliana
ttgaccagtccgccagc

SEQ ID NO: 164045 - DNA, 17 bp, Arabidopsis thaliana
ttgaccagtgttgaccg

SEQ ID NO: 164046 - DNA, 17 bp, Arabidopsis thaliana
ttgaccagttcagttgg

SEQ ID NO: 164047 - DNA, 17 bp, Arabidopsis thaliana
ttgaccagttctgtagc

SEQ ID NO: 164048 - DNA, 17 bp, Arabidopsis thaliana
ttgaccagttgaaggag

SEQ ID NO: 164049 - DNA, 17 bp, Arabidopsis thaliana
ttgaccatatgaacaac

SEQ ID NO: 164050 - DNA, 17 bp, Arabidopsis thaliana
ttgaccatatggacaac

SEQ ID NO: 164051 - DNA, 17 bp, Arabidopsis thaliana
ttgaccatatggacaat

SEQ ID NO: 164052 - DNA, 17 bp, Arabidopsis thaliana
ttgaccatatggacagt

SEQ ID NO: 164053 - DNA, 17 bp, Arabidopsis thaliana
ttgaccatccactgaga

SEQ ID NO: 164054 - DNA, 17 bp, Arabidopsis thaliana
ttgaccatcttcaactg

SEQ ID NO: 164055 - DNA, 17 bp, Arabidopsis thaliana
ttgaccatgcccagcgg

SEQ ID NO: 164056 - DNA, 17 bp, Arabidopsis thaliana
ttgaccattcacatcga

SEQ ID NO: 164057 - DNA, 17 bp, Arabidopsis thaliana
ttgacccagaacctcct

SEQ ID NO: 164058 - DNA, 17 bp, Arabidopsis thaliana
ttgacccaggtgacgac

SEQ ID NO: 164059 - DNA, 17 bp, Arabidopsis thaliana
ttgacccctcttatttt

SEQ ID NO: 164060 - DNA, 17 bp, Arabidopsis thaliana
ttgacccgatttttgaa

SEQ ID NO: 164061 - DNA, 17 bp, Arabidopsis thaliana
ttgacccgcgcccctac

SEQ ID NO: 164062 - DNA, 17 bp, Arabidopsis thaliana
ttgacccgcttgatctc

SEQ ID NO: 164063 - DNA, 17 bp, Arabidopsis thaliana
ttgacccggatgatgtc

SEQ ID NO: 164064 - DNA, 17 bp, Arabidopsis thaliana
ttgacccgggttcgttc

SEQ ID NO: 164065 - DNA, 17 bp, Arabidopsis thaliana
ttgacccggtgacccag

SEQ ID NO: 164066 - DNA, 17 bp, Arabidopsis thaliana
ttgaccctcttcatacg

SEQ ID NO: 164067 - DNA, 17 bp, Arabidopsis thaliana
ttgacccttctcgtcat

SEQ ID NO: 164068 - DNA, 17 bp, Arabidopsis thaliana
ttgaccgacgcggatta

SEQ ID NO: 164069 - DNA, 17 bp, Arabidopsis thaliana
ttgaccgactagtttag

SEQ ID NO: 164070 - DNA, 17 bp, Arabidopsis thaliana
ttgaccgactgtgggtg

SEQ ID NO: 164071 - DNA, 17 bp, Arabidopsis thaliana
ttgaccgagccaaatta

SEQ ID NO: 164072 - DNA, 17 bp, Arabidopsis thaliana
ttgaccgcaacttctgt

SEQ ID NO: 164073 - DNA, 17 bp, Arabidopsis thaliana
ttgaccgcgccatttta

SEQ ID NO: 164074 - DNA, 17 bp, Arabidopsis thaliana
ttgaccgggagtttgac

SEQ ID NO: 164075 - DNA, 17 bp, Arabidopsis thaliana
ttgaccgggatctctct

SEQ ID NO: 164076 - DNA, 17 bp, Arabidopsis thaliana
ttgaccgggtcaacgat

SEQ ID NO: 164077 - DNA, 17 bp, Arabidopsis thaliana
ttgaccggttaacctga

SEQ ID NO: 164078 - DNA, 17 bp, Arabidopsis thaliana
ttgaccgtatgaacaat

SEQ ID NO: 164079 - DNA, 17 bp, Arabidopsis thaliana
ttgaccgtatggacaat

SEQ ID NO: 164080 - DNA, 17 bp, Arabidopsis thaliana
ttgaccgttgactccct

SEQ ID NO: 164081 - DNA, 17 bp, Arabidopsis thaliana
ttgaccgttgatttctt

SEQ ID NO: 164082 - DNA, 17 bp, Arabidopsis thaliana
ttgacctcctgttgttg

SEQ ID NO: 164083 - DNA, 17 bp, Arabidopsis thaliana
ttgacctggcagccgaa

SEQ ID NO: 164084 - DNA, 17 bp, Arabidopsis thaliana
ttgacctggcagctcct

SEQ ID NO: 164085 - DNA, 17 bp, Arabidopsis thaliana
ttgacctggtgacctac

SEQ ID NO: 164086 - DNA, 17 bp, Arabidopsis thaliana
ttgacctggtgacctag

SEQ ID NO: 164087 - DNA, 17 bp, Arabidopsis thaliana
ttgacctggtgtgggtc

SEQ ID NO: 164088 - DNA, 17 bp, Arabidopsis thaliana
ttgacctgttacttttg

SEQ ID NO: 164089 - DNA, 17 bp, Arabidopsis thaliana
ttgacctgttggcgaca

SEQ ID NO: 164090 - DNA, 17 bp, Arabidopsis thaliana
ttgaccttggatctgtg

SEQ ID NO: 164091 - DNA, 17 bp, Arabidopsis thaliana
ttgaccttggctctgtt

SEQ ID NO: 164092 - DNA, 17 bp, Arabidopsis thaliana
ttgaccttgtaagaccc

SEQ ID NO: 164093 - DNA, 17 bp, Arabidopsis thaliana
ttgacgaaactaccctt

SEQ ID NO: 164094 - DNA, 17 bp, Arabidopsis thaliana
ttgacgaaagcggtggt

SEQ ID NO: 164095 - DNA, 17 bp, Arabidopsis thaliana
ttgacgacccgacaaac

SEQ ID NO: 164096 - DNA, 17 bp, Arabidopsis thaliana
ttgacgacccttcattg

SEQ ID NO: 164097 - DNA, 17 bp, Arabidopsis thaliana
ttgacgacctcttgtgt

SEQ ID NO: 164098 - DNA, 17 bp, Arabidopsis thaliana
ttgacgacgaaaacttg

SEQ ID NO: 164099 - DNA, 17 bp, Arabidopsis thaliana
ttgacgactctcggcaa

SEQ ID NO: 164100 - DNA, 17 bp, Arabidopsis thaliana
ttgacgactgaaaccag

SEQ ID NO: 164101 - DNA, 17 bp, Arabidopsis thaliana
ttgacgacttgcacagg

SEQ ID NO: 164102 - DNA, 17 bp, Arabidopsis thaliana
ttgacgagacagcaaag

SEQ ID NO: 164103 - DNA, 17 bp, Arabidopsis thaliana
ttgacgagagaacttat

SEQ ID NO: 164104 - DNA, 17 bp, Arabidopsis thaliana
ttgacgaggtcgttaat

SEQ ID NO: 164105 - DNA, 17 bp, Arabidopsis thaliana
ttgacgagttcgagtaa

SEQ ID NO: 164106 - DNA, 17 bp, Arabidopsis thaliana
ttgacgatagcggtggt

SEQ ID NO: 164107 - DNA, 17 bp, Arabidopsis thaliana
ttgacgatccacttcag

SEQ ID NO: 164108 - DNA, 17 bp, Arabidopsis thaliana
ttgacgattatttgatt

SEQ ID NO: 164109 - DNA, 17 bp, Arabidopsis thaliana
ttgacgcgattcggttc

SEQ ID NO: 164110 - DNA, 17 bp, Arabidopsis thaliana
ttgacgcggattacggt

SEQ ID NO: 164111 - DNA, 17 bp, Arabidopsis thaliana
ttgacgctagcggtggt

SEQ ID NO: 164112 - DNA, 17 bp, Arabidopsis thaliana
ttgacggaagggcacca

SEQ ID NO: 164113 - DNA, 17 bp, Arabidopsis thaliana
ttgacggaattgtggcg

SEQ ID NO: 164114 - DNA, 17 bp, Arabidopsis thaliana
ttgacggaattgtggct

SEQ ID NO: 164115 - DNA, 17 bp, Arabidopsis thaliana
ttgacggatgtccaacg

SEQ ID NO: 164116 - DNA, 17 bp, Arabidopsis thaliana
ttgacggcaacgttagg

SEQ ID NO: 164117 - DNA, 17 bp, Arabidopsis thaliana
ttgacggcggtgctcac

SEQ ID NO: 164118 - DNA, 17 bp, Arabidopsis thaliana
ttgacggctcaatttcg

SEQ ID NO: 164119 - DNA, 17 bp, Arabidopsis thaliana
ttgacggctcacatgct

SEQ ID NO: 164120 - DNA, 17 bp, Arabidopsis thaliana
ttgacggctcacatggt

SEQ ID NO: 164121 - DNA, 17 bp, Arabidopsis thaliana
ttgacgggaaaatcacg

SEQ ID NO: 164122 - DNA, 17 bp, Arabidopsis thaliana
ttgacgggggcccgcac

SEQ ID NO: 164123 - DNA, 17 bp, Arabidopsis thaliana
ttgacgggtttggcagg

SEQ ID NO: 164124 - DNA, 17 bp, Arabidopsis thaliana
ttgacggtttcacggct

SEQ ID NO: 164125 - DNA, 17 bp, Arabidopsis thaliana
ttgactacacggcttca

SEQ ID NO: 164126 - DNA, 17 bp, Arabidopsis thaliana
ttgactacgtccctgcc

SEQ ID NO: 164127 - DNA, 17 bp, Arabidopsis thaliana
ttgactacgtccctgct

SEQ ID NO: 164128 - DNA, 17 bp, Arabidopsis thaliana
ttgactagactatttcg

SEQ ID NO: 164129 - DNA, 17 bp, Arabidopsis thaliana
ttgactagcttctaatc

SEQ ID NO: 164130 - DNA, 17 bp, Arabidopsis thaliana
ttgactagtgttgacag

SEQ ID NO: 164131 - DNA, 17 bp, Arabidopsis thaliana
ttgactagtgttgaccg

SEQ ID NO: 164132 - DNA, 17 bp, Arabidopsis thaliana
ttgactcaggaacatcg

SEQ ID NO: 164133 - DNA, 17 bp, Arabidopsis thaliana
ttgactcagtgattcgg

SEQ ID NO: 164134 - DNA, 17 bp, Arabidopsis thaliana
ttgactcatcaactcat

SEQ ID NO: 164135 - DNA, 17 bp, Arabidopsis thaliana
ttgactcatcgacggca

SEQ ID NO: 164136 - DNA, 17 bp, Arabidopsis thaliana
ttgactccgaacttctt

SEQ ID NO: 164137 - DNA, 17 bp, Arabidopsis thaliana
ttgactccggagcgagg

SEQ ID NO: 164138 - DNA, 17 bp, Arabidopsis thaliana
ttgactcctctgaaaga

SEQ ID NO: 164139 - DNA, 17 bp, Arabidopsis thaliana
ttgactcggctcaagct

SEQ ID NO: 164140 - DNA, 17 bp, Arabidopsis thaliana
ttgactcggtaacttgg

SEQ ID NO: 164141 - DNA, 17 bp, Arabidopsis thaliana
ttgactctagtccgact

SEQ ID NO: 164142 - DNA, 17 bp, Arabidopsis thaliana
ttgactgaacgcctcta

SEQ ID NO: 164143 - DNA, 17 bp, Arabidopsis thaliana
ttgactgacccgttaaa

SEQ ID NO: 164144 - DNA, 17 bp, Arabidopsis thaliana
ttgactgacctcgtaga

SEQ ID NO: 164145 - DNA, 17 bp, Arabidopsis thaliana
ttgactgatgaaccata

SEQ ID NO: 164146 - DNA, 17 bp, Arabidopsis thaliana
ttgactgatgatgtttc

SEQ ID NO: 164147 - DNA, 17 bp, Arabidopsis thaliana
ttgactgattttccaag

SEQ ID NO: 164148 - DNA, 17 bp, Arabidopsis thaliana
ttgactgcagatcaata

SEQ ID NO: 164149 - DNA, 17 bp, Arabidopsis thaliana
ttgactgccaacttcta

SEQ ID NO: 164150 - DNA, 17 bp, Arabidopsis thaliana
ttgactgctccggtcgg

SEQ ID NO: 164151 - DNA, 17 bp, Arabidopsis thaliana
ttgactgctgacggatt

SEQ ID NO: 164152 - DNA, 17 bp, Arabidopsis thaliana
ttgactgcttccacaag

SEQ ID NO: 164153 - DNA, 17 bp, Arabidopsis thaliana
ttgactgggcaaaagca

SEQ ID NO: 164154 - DNA, 17 bp, Arabidopsis thaliana
ttgactggtgtggcagg

SEQ ID NO: 164155 - DNA, 17 bp, Arabidopsis thaliana
ttgacttagccggtggt

SEQ ID NO: 164156 - DNA, 17 bp, Arabidopsis thaliana
ttgacttaggacctggg

SEQ ID NO: 164157 - DNA, 17 bp, Arabidopsis thaliana
ttgacttagtccgactt

SEQ ID NO: 164158 - DNA, 17 bp, Arabidopsis thaliana
ttgacttattgcggaca

SEQ ID NO: 164159 - DNA, 17 bp, Arabidopsis thaliana
ttgacttcactacctct

SEQ ID NO: 164160 - DNA, 17 bp, Arabidopsis thaliana
ttgacttcccctggggg

SEQ ID NO: 164161 - DNA, 17 bp, Arabidopsis thaliana
ttgacttcctccgtatg

SEQ ID NO: 164162 - DNA, 17 bp, Arabidopsis thaliana
ttgacttcgtgagcgag

SEQ ID NO: 164163 - DNA, 17 bp, Arabidopsis thaliana
ttgacttctcgacgctt

SEQ ID NO: 164164 - DNA, 17 bp, Arabidopsis thaliana
ttgacttcttcaacctc

SEQ ID NO: 164165 - DNA, 17 bp, Arabidopsis thaliana
ttgacttcttggacact

SEQ ID NO: 164166 - DNA, 17 bp, Arabidopsis thaliana
ttgacttgacaattcgt

SEQ ID NO: 164167 - DNA, 17 bp, Arabidopsis thaliana
ttgacttgacacgtgac

SEQ ID NO: 164168 - DNA, 17 bp, Arabidopsis thaliana
ttgacttgacacgtgcc

SEQ ID NO: 164169 - DNA, 17 bp, Arabidopsis thaliana
ttgacttgacacgtggc

SEQ ID NO: 164170 - DNA, 17 bp, Arabidopsis thaliana
ttgacttgacacgtggt

SEQ ID NO: 164171 - DNA, 17 bp, Arabidopsis thaliana
ttgacttgcaagcccac

SEQ ID NO: 164172 - DNA, 17 bp, Arabidopsis thaliana
ttgacttgctttcagcc

SEQ ID NO: 164173 - DNA, 17 bp, Arabidopsis thaliana
ttgacttggcggatttc

SEQ ID NO: 164174 - DNA, 17 bp, Arabidopsis thaliana
ttgacttggctgaagcc

SEQ ID NO: 164175 - DNA, 17 bp, Arabidopsis thaliana
ttgactttgctattttg

SEQ ID NO: 164176 - DNA, 17 bp, Arabidopsis thaliana
ttgactttggtctctcc

SEQ ID NO: 164177 - DNA, 17 bp, Arabidopsis thaliana
ttgactttttcgggcat

SEQ ID NO: 164178 - DNA, 17 bp, Arabidopsis thaliana
ttgagaaagttgctgcg

SEQ ID NO: 164179 - DNA, 17 bp, Arabidopsis thaliana
ttgagaactgtccattt

SEQ ID NO: 164180 - DNA, 17 bp, Arabidopsis thaliana
ttgagacctgcagaccg

SEQ ID NO: 164181 - DNA, 17 bp, Arabidopsis thaliana
ttgagactacccgtggg

SEQ ID NO: 164182 - DNA, 17 bp, Arabidopsis thaliana
ttgagacttagcttcca

SEQ ID NO: 164183 - DNA, 17 bp, Arabidopsis thaliana
ttgagacttatttacaa

SEQ ID NO: 164184 - DNA, 17 bp, Arabidopsis thaliana
ttgagacttatttacat

SEQ ID NO: 164185 - DNA, 17 bp, Arabidopsis thaliana
ttgagagatttatcact

SEQ ID NO: 164186 - DNA, 17 bp, Arabidopsis thaliana
ttgagagatttggtgtt

SEQ ID NO: 164187 - DNA, 17 bp, Arabidopsis thaliana
ttgagatcaacctttgg

SEQ ID NO: 164188 - DNA, 17 bp, Arabidopsis thaliana
ttgagatccacggggcg

SEQ ID NO: 164189 - DNA, 17 bp, Arabidopsis thaliana
ttgagatcctgatcagc

SEQ ID NO: 164190 - DNA, 17 bp, Arabidopsis thaliana
ttgagatcgggttgcgg

SEQ ID NO: 164191 - DNA, 17 bp, Arabidopsis thaliana
ttgagatcgttattgag

SEQ ID NO: 164192 - DNA, 17 bp, Arabidopsis thaliana
ttgagatcttgtgcttc

SEQ ID NO: 164193 - DNA, 17 bp, Arabidopsis thaliana
ttgagatgatctgatga

SEQ ID NO: 164194 - DNA, 17 bp, Arabidopsis thaliana
ttgagatggcgacattt

SEQ ID NO: 164195 - DNA, 17 bp, Arabidopsis thaliana
ttgagatgtaccttcca

SEQ ID NO: 164196 - DNA, 17 bp, Arabidopsis thaliana
ttgagattccagggttt

SEQ ID NO: 164197 - DNA, 17 bp, Arabidopsis thaliana
ttgagattgctgttgtt

SEQ ID NO: 164198 - DNA, 17 bp, Arabidopsis thaliana
ttgagatttatttatag

SEQ ID NO: 164199 - DNA, 17 bp, Arabidopsis thaliana
ttgagcaagatgttggc

SEQ ID NO: 164200 - DNA, 17 bp, Arabidopsis thaliana
ttgagcacggtcgagaa

SEQ ID NO: 164201 - DNA, 17 bp, Arabidopsis thaliana
ttgagcagtctgttgag

SEQ ID NO: 164202 - DNA, 17 bp, Arabidopsis thaliana
ttgagcattctggagca

SEQ ID NO: 164203 - DNA, 17 bp, Arabidopsis thaliana
ttgagccaactgttgcc

SEQ ID NO: 164204 - DNA, 17 bp, Arabidopsis thaliana
ttgagccagaatggatg

SEQ ID NO: 164205 - DNA, 17 bp, Arabidopsis thaliana
ttgagccatgccaatat

SEQ ID NO: 164206 - DNA, 17 bp, Arabidopsis thaliana
ttgagcccagacatttc

SEQ ID NO: 164207 - DNA, 17 bp, Arabidopsis thaliana
ttgagccgctgacacgt

SEQ ID NO: 164208 - DNA, 17 bp, Arabidopsis thaliana
ttgagccgtgccaacat

SEQ ID NO: 164209 - DNA, 17 bp, Arabidopsis thaliana
ttgagccgtgccaataa

SEQ ID NO: 164210 - DNA, 17 bp, Arabidopsis thaliana
ttgagccgtgccaatat

SEQ ID NO: 164211 - DNA, 17 bp, Arabidopsis thaliana
ttgagccgtgccaattc

SEQ ID NO: 164212 - DNA, 17 bp, Arabidopsis thaliana
ttgagccgtgccactat

SEQ ID NO: 164213 - DNA, 17 bp, Arabidopsis thaliana
ttgagccgtgccagtat

SEQ ID NO: 164214 - DNA, 17 bp, Arabidopsis thaliana
ttgagccgtgccatatc

SEQ ID NO: 164215 - DNA, 17 bp, Arabidopsis thaliana
ttgagccgtgccattat

SEQ ID NO: 164216 - DNA, 17 bp, Arabidopsis thaliana
ttgagccgtgcccctat

SEQ ID NO: 164217 - DNA, 17 bp, Arabidopsis thaliana
ttgagccgtgccgatgg

SEQ ID NO: 164218 - DNA, 17 bp, Arabidopsis thaliana
ttgagcgactgtttttg

SEQ ID NO: 164219 - DNA, 17 bp, Arabidopsis thaliana
ttgagcgagtgagagcg

SEQ ID NO: 164220 - DNA, 17 bp, Arabidopsis thaliana
ttgagcggccagaggga

SEQ ID NO: 164221 - DNA, 17 bp, Arabidopsis thaliana
ttgagcgtctggcaact

SEQ ID NO: 164222 - DNA, 17 bp, Arabidopsis thaliana
ttgagcgtgagccacca

SEQ ID NO: 164223 - DNA, 17 bp, Arabidopsis thaliana
ttgaggacagcaaactt

SEQ ID NO: 164224 - DNA, 17 bp, Arabidopsis thaliana
ttgaggagccctaccga

SEQ ID NO: 164225 - DNA, 17 bp, Arabidopsis thaliana
ttgaggagtggctatca

SEQ ID NO: 164226 - DNA, 17 bp, Arabidopsis thaliana
ttgaggatgatggcgga

SEQ ID NO: 164227 - DNA, 17 bp, Arabidopsis thaliana
ttgaggccttggcggat

SEQ ID NO: 164228 - DNA, 17 bp, Arabidopsis thaliana
ttgaggcgcagcagtag

SEQ ID NO: 164229 - DNA, 17 bp, Arabidopsis thaliana
ttgaggcggaactgcaa

SEQ ID NO: 164230 - DNA, 17 bp, Arabidopsis thaliana
ttgaggcgtttgacatg

SEQ ID NO: 164231 - DNA, 17 bp, Arabidopsis thaliana
ttgaggctcaatttgtt

SEQ ID NO: 164232 - DNA, 17 bp, Arabidopsis thaliana
ttgagggcacgtctgcc

SEQ ID NO: 164233 - DNA, 17 bp, Arabidopsis thaliana
ttgagggttcaagtccc

SEQ ID NO: 164234 - DNA, 17 bp, Arabidopsis thaliana
ttgaggtcagtgtgtta

SEQ ID NO: 164235 - DNA, 17 bp, Arabidopsis thaliana
ttgaggtccctactgaa

SEQ ID NO: 164236 - DNA, 17 bp, Arabidopsis thaliana
ttgaggtggctttttaa

SEQ ID NO: 164237 - DNA, 17 bp, Arabidopsis thaliana
ttgaggtgtgtaagcaa

SEQ ID NO: 164238 - DNA, 17 bp, Arabidopsis thaliana
ttgaggtgtgtaaggaa

SEQ ID NO: 164239 - DNA, 17 bp, Arabidopsis thaliana
ttgaggttgtgattcct

SEQ ID NO: 164240 - DNA, 17 bp, Arabidopsis thaliana
ttgagtaggtgtgcctt

SEQ ID NO: 164241 - DNA, 17 bp, Arabidopsis thaliana
ttgagtcccaccgggtg

SEQ ID NO: 164242 - DNA, 17 bp, Arabidopsis thaliana
ttgagtccctctacgcg

SEQ ID NO: 164243 - DNA, 17 bp, Arabidopsis thaliana
ttgagtcctcgtgttgc

SEQ ID NO: 164244 - DNA, 17 bp, Arabidopsis thaliana
ttgagtcgcatggcacc

SEQ ID NO: 164245 - DNA, 17 bp, Arabidopsis thaliana
ttgagtcgtcgcatttt

SEQ ID NO: 164246 - DNA, 17 bp, Arabidopsis thaliana
ttgagtctaagctgcac

SEQ ID NO: 164247 - DNA, 17 bp, Arabidopsis thaliana
ttgagtctactggtgtc

SEQ ID NO: 164248 - DNA, 17 bp, Arabidopsis thaliana
ttgagtgacgcttggaa

SEQ ID NO: 164249 - DNA, 17 bp, Arabidopsis thaliana
ttgagttaatcagcgct

SEQ ID NO: 164250 - DNA, 17 bp, Arabidopsis thaliana
ttgagttcagccggtga

SEQ ID NO: 164251 - DNA, 17 bp, Arabidopsis thaliana
ttgagttgacccatgaa

SEQ ID NO: 164252 - DNA, 17 bp, Arabidopsis thaliana
ttgagttgagttgagtt

SEQ ID NO: 164253 - DNA, 17 bp, Arabidopsis thaliana
ttgagttgccgcagctg

SEQ ID NO: 164254 - DNA, 17 bp, Arabidopsis thaliana
ttgagttggaagcccac

SEQ ID NO: 164255 - DNA, 17 bp, Arabidopsis thaliana
ttgagttggaagcccag

SEQ ID NO: 164256 - DNA, 17 bp, Arabidopsis thaliana
ttgagttgggactagcg

SEQ ID NO: 164257 - DNA, 17 bp, Arabidopsis thaliana
ttgagttgggctaccta

SEQ ID NO: 164258 - DNA, 17 bp, Arabidopsis thaliana
ttgagtttaggttgcca

SEQ ID NO: 164259 - DNA, 17 bp, Arabidopsis thaliana
ttgagtttgctgagttg

SEQ ID NO: 164260 - DNA, 17 bp, Arabidopsis thaliana
ttgataaccaccggagt

SEQ ID NO: 164261 - DNA, 17 bp, Arabidopsis thaliana
ttgataaccgccgttaa

SEQ ID NO: 164262 - DNA, 17 bp, Arabidopsis thaliana
ttgataggatcagttgt

SEQ ID NO: 164263 - DNA, 17 bp, Arabidopsis thaliana
ttgataggttgccccag

SEQ ID NO: 164264 - DNA, 17 bp, Arabidopsis thaliana
ttgatatgccggtggat

SEQ ID NO: 164265 - DNA, 17 bp, Arabidopsis thaliana
ttgatcaacgggttttg

SEQ ID NO: 164266 - DNA, 17 bp, Arabidopsis thaliana
ttgatcaagggttgtta

SEQ ID NO: 164267 - DNA, 17 bp, Arabidopsis thaliana
ttgatcaatttgtgcgc

SEQ ID NO: 164268 - DNA, 17 bp, Arabidopsis thaliana
ttgatcagcagagtagt

SEQ ID NO: 164269 - DNA, 17 bp, Arabidopsis thaliana
ttgatcagtatcagccc

SEQ ID NO: 164270 - DNA, 17 bp, Arabidopsis thaliana
ttgatccacgctcaccg

SEQ ID NO: 164271 - DNA, 17 bp, Arabidopsis thaliana
ttgatcccattgactgc

SEQ ID NO: 164272 - DNA, 17 bp, Arabidopsis thaliana
ttgatccctgtataggc

SEQ ID NO: 164273 - DNA, 17 bp, Arabidopsis thaliana
ttgatccgcattatttg

SEQ ID NO: 164274 - DNA, 17 bp, Arabidopsis thaliana
ttgatccgccgccgccc

SEQ ID NO: 164275 - DNA, 17 bp, Arabidopsis thaliana
ttgatccgctggagcag

SEQ ID NO: 164276 - DNA, 17 bp, Arabidopsis thaliana
ttgatccgcttaatccg

SEQ ID NO: 164277 - DNA, 17 bp, Arabidopsis thaliana
ttgatccgctttgttct

SEQ ID NO: 164278 - DNA, 17 bp, Arabidopsis thaliana
ttgatccttcgatgtcg

SEQ ID NO: 164279 - DNA, 17 bp, Arabidopsis thaliana
ttgatcgacaccagttt

SEQ ID NO: 164280 - DNA, 17 bp, Arabidopsis thaliana
ttgatcgccacacttgg

SEQ ID NO: 164281 - DNA, 17 bp, Arabidopsis thaliana
ttgatcgccgagttagt

SEQ ID NO: 164282 - DNA, 17 bp, Arabidopsis thaliana
ttgatcgctaagtcagc

SEQ ID NO: 164283 - DNA, 17 bp, Arabidopsis thaliana
ttgatcgctaagttgtt

SEQ ID NO: 164284 - DNA, 17 bp, Arabidopsis thaliana
ttgatcgctacgtcagc

SEQ ID NO: 164285 - DNA, 17 bp, Arabidopsis thaliana
ttgatcgctggcaacta

SEQ ID NO: 164286 - DNA, 17 bp, Arabidopsis thaliana
ttgatcgctgtcgctgg

SEQ ID NO: 164287 - DNA, 17 bp, Arabidopsis thaliana
ttgatcgcttggacatc

SEQ ID NO: 164288 - DNA, 17 bp, Arabidopsis thaliana
ttgatcggactcagcat

SEQ ID NO: 164289 - DNA, 17 bp, Arabidopsis thaliana
ttgatcggcattgacca

SEQ ID NO: 164290 - DNA, 17 bp, Arabidopsis thaliana
ttgatcggtgaaccagc

SEQ ID NO: 164291 - DNA, 17 bp, Arabidopsis thaliana
ttgatcgttctcattgc

SEQ ID NO: 164292 - DNA, 17 bp, Arabidopsis thaliana
ttgatcgtttgacttaa

SEQ ID NO: 164293 - DNA, 17 bp, Arabidopsis thaliana
ttgatcgtttgacttga

SEQ ID NO: 164294 - DNA, 17 bp, Arabidopsis thaliana
ttgatctacatgaaccg

SEQ ID NO: 164295 - DNA, 17 bp, Arabidopsis thaliana
ttgatctacgctcaccg

SEQ ID NO: 164296 - DNA, 17 bp, Arabidopsis thaliana
ttgatctcgaacaaggc

SEQ ID NO: 164297 - DNA, 17 bp, Arabidopsis thaliana
ttgatctctatcctcga

SEQ ID NO: 164298 - DNA, 17 bp, Arabidopsis thaliana
ttgatctctcgggtcca

SEQ ID NO: 164299 - DNA, 17 bp, Arabidopsis thaliana
ttgatctgcaaatttgc

SEQ ID NO: 164300 - DNA, 17 bp, Arabidopsis thaliana
ttgatctgcaagggagg

SEQ ID NO: 164301 - DNA, 17 bp, Arabidopsis thaliana
ttgatctgccagcgatt

SEQ ID NO: 164302 - DNA, 17 bp, Arabidopsis thaliana
ttgatctgctccgtccg

SEQ ID NO: 164303 - DNA, 17 bp, Arabidopsis thaliana
ttgatctgcttgaccgt

SEQ ID NO: 164304 - DNA, 17 bp, Arabidopsis thaliana
ttgatctttctcaacat

SEQ ID NO: 164305 - DNA, 17 bp, Arabidopsis thaliana
ttgatctttgaccttgg

SEQ ID NO: 164306 - DNA, 17 bp, Arabidopsis thaliana
ttgatgaaccatgaccg

SEQ ID NO: 164307 - DNA, 17 bp, Arabidopsis thaliana
ttgatgaactgtcggca

SEQ ID NO: 164308 - DNA, 17 bp, Arabidopsis thaliana
ttgatgacccgtcttta

SEQ ID NO: 164309 - DNA, 17 bp, Arabidopsis thaliana
ttgatgactcgacaaag

SEQ ID NO: 164310 - DNA, 17 bp, Arabidopsis thaliana
ttgatgatctcctctca

SEQ ID NO: 164311 - DNA, 17 bp, Arabidopsis thaliana
ttgatgattctggaccg

SEQ ID NO: 164312 - DNA, 17 bp, Arabidopsis thaliana
ttgatgcaggcggatgt

SEQ ID NO: 164313 - DNA, 17 bp, Arabidopsis thaliana
ttgatgccaccgccaac

SEQ ID NO: 164314 - DNA, 17 bp, Arabidopsis thaliana
ttgatggaaatcgccga

SEQ ID NO: 164315 - DNA, 17 bp, Arabidopsis thaliana
ttgatggagatggttaa

SEQ ID NO: 164316 - DNA, 17 bp, Arabidopsis thaliana
ttgatggattgcgtggt

SEQ ID NO: 164317 - DNA, 17 bp, Arabidopsis thaliana
ttgatgggatgatccaa

SEQ ID NO: 164318 - DNA, 17 bp, Arabidopsis thaliana
ttgatgtatcgatcgac

SEQ ID NO: 164319 - DNA, 17 bp, Arabidopsis thaliana
ttgatgtcatccgggat

SEQ ID NO: 164320 - DNA, 17 bp, Arabidopsis thaliana
ttgatgtcggtctgatt

SEQ ID NO: 164321 - DNA, 17 bp, Arabidopsis thaliana
ttgatgtcgtttactcg

SEQ ID NO: 164322 - DNA, 17 bp, Arabidopsis thaliana
ttgatgtcttaccgccg

SEQ ID NO: 164323 - DNA, 17 bp, Arabidopsis thaliana
ttgatgtgacttctgcc

SEQ ID NO: 164324 - DNA, 17 bp, Arabidopsis thaliana
ttgatgtgcattcttct

SEQ ID NO: 164325 - DNA, 17 bp, Arabidopsis thaliana
ttgatgtgccggattgg

SEQ ID NO: 164326 - DNA, 17 bp, Arabidopsis thaliana
ttgatgtgcggccaaca

SEQ ID NO: 164327 - DNA, 17 bp, Arabidopsis thaliana
ttgatgtgctaatggtc

SEQ ID NO: 164328 - DNA, 17 bp, Arabidopsis thaliana
ttgattatcgacgcatg

SEQ ID NO: 164329 - DNA, 17 bp, Arabidopsis thaliana
ttgattatgacggcggc

SEQ ID NO: 164330 - DNA, 17 bp, Arabidopsis thaliana
ttgattcaggtgtgacc

SEQ ID NO: 164331 - DNA, 17 bp, Arabidopsis thaliana
ttgattccggtgaaacg

SEQ ID NO: 164332 - DNA, 17 bp, Arabidopsis thaliana
ttgattccgttcgcact

SEQ ID NO: 164333 - DNA, 17 bp, Arabidopsis thaliana
ttgattcctttgaaccg

SEQ ID NO: 164334 - DNA, 17 bp, Arabidopsis thaliana
ttgattctatgggtggt

SEQ ID NO: 164335 - DNA, 17 bp, Arabidopsis thaliana
ttgattcttctgcaacc

SEQ ID NO: 164336 - DNA, 17 bp, Arabidopsis thaliana
ttgattgaagcccatgt

SEQ ID NO: 164337 - DNA, 17 bp, Arabidopsis thaliana
ttgattgacatgtggcg

SEQ ID NO: 164338 - DNA, 17 bp, Arabidopsis thaliana
ttgattgcgcaagagct

SEQ ID NO: 164339 - DNA, 17 bp, Arabidopsis thaliana
ttgattggccacttcaa

SEQ ID NO: 164340 - DNA, 17 bp, Arabidopsis thaliana
ttgattgggctttggca

SEQ ID NO: 164341 - DNA, 17 bp, Arabidopsis thaliana
ttgattgggttgccaaa

SEQ ID NO: 164342 - DNA, 17 bp, Arabidopsis thaliana
ttgatttaccgctccct

SEQ ID NO: 164343 - DNA, 17 bp, Arabidopsis thaliana
ttgatttcgaacaaggc

SEQ ID NO: 164344 - DNA, 17 bp, Arabidopsis thaliana
ttgatttgaaggcggct

SEQ ID NO: 164345 - DNA, 17 bp, Arabidopsis thaliana
ttgatttgacacgtgac

SEQ ID NO: 164346 - DNA, 17 bp, Arabidopsis thaliana
ttgatttgaccacctat

SEQ ID NO: 164347 - DNA, 17 bp, Arabidopsis thaliana
ttgatttgccattttgg

SEQ ID NO: 164348 - DNA, 17 bp, Arabidopsis thaliana
ttgatttggatctcgcc

SEQ ID NO: 164349 - DNA, 17 bp, Arabidopsis thaliana
ttgatttggtcgggtcg

SEQ ID NO: 164350 - DNA, 17 bp, Arabidopsis thaliana
ttgatttgttgatctgt

SEQ ID NO: 164351 - DNA, 17 bp, Arabidopsis thaliana
ttgattttccgagattg

SEQ ID NO: 164352 - DNA, 17 bp, Arabidopsis thaliana
ttgattttttgcccaat

SEQ ID NO: 164353 - DNA, 17 bp, Arabidopsis thaliana
ttgcaaaacaacgttgt

SEQ ID NO: 164354 - DNA, 17 bp, Arabidopsis thaliana
ttgcaaaactgccctta

SEQ ID NO: 164355 - DNA, 17 bp, Arabidopsis thaliana
ttgcaaaaggtgcccgt

SEQ ID NO: 164356 - DNA, 17 bp, Arabidopsis thaliana
ttgcaaaatccatcgat

SEQ ID NO: 164357 - DNA, 17 bp, Arabidopsis thaliana
ttgcaaaatctaatata

SEQ ID NO: 164358 - DNA, 17 bp, Arabidopsis thaliana
ttgcaaaccctaccaag

SEQ ID NO: 164359 - DNA, 17 bp, Arabidopsis thaliana
ttgcaaactctaggatt

SEQ ID NO: 164360 - DNA, 17 bp, Arabidopsis thaliana
ttgcaaagacaaccagg

SEQ ID NO: 164361 - DNA, 17 bp, Arabidopsis thaliana
ttgcaaagacttgctgt

SEQ ID NO: 164362 - DNA, 17 bp, Arabidopsis thaliana
ttgcaaagatattggac

SEQ ID NO: 164363 - DNA, 17 bp, Arabidopsis thaliana
ttgcaaagccgatctct

SEQ ID NO: 164364 - DNA, 17 bp, Arabidopsis thaliana
ttgcaaagccgatcttc

SEQ ID NO: 164365 - DNA, 17 bp, Arabidopsis thaliana
ttgcaaaggatggaacg

SEQ ID NO: 164366 - DNA, 17 bp, Arabidopsis thaliana
ttgcaaatccctcgcaa

SEQ ID NO: 164367 - DNA, 17 bp, Arabidopsis thaliana
ttgcaaatgcaacagtt

SEQ ID NO: 164368 - DNA, 17 bp, Arabidopsis thaliana
ttgcaacaacttcggcc

SEQ ID NO: 164369 - DNA, 17 bp, Arabidopsis thaliana
ttgcaacaagcgggacc

SEQ ID NO: 164370 - DNA, 17 bp, Arabidopsis thaliana
ttgcaacaatacacttt

SEQ ID NO: 164371 - DNA, 17 bp, Arabidopsis thaliana
ttgcaacaatacccttt

SEQ ID NO: 164372 - DNA, 17 bp, Arabidopsis thaliana
ttgcaacacggaccaag

SEQ ID NO: 164373 - DNA, 17 bp, Arabidopsis thaliana
ttgcaacgtgcgactgt

SEQ ID NO: 164374 - DNA, 17 bp, Arabidopsis thaliana
ttgcaagaagatccgct

SEQ ID NO: 164375 - DNA, 17 bp, Arabidopsis thaliana
ttgcaagactatcggtc

SEQ ID NO: 164376 - DNA, 17 bp, Arabidopsis thaliana
ttgcaagatgagtgctc

SEQ ID NO: 164377 - DNA, 17 bp, Arabidopsis thaliana
ttgcaaggctaaatact

SEQ ID NO: 164378 - DNA, 17 bp, Arabidopsis thaliana
ttgcaagggagtgctag

SEQ ID NO: 164379 - DNA, 17 bp, Arabidopsis thaliana
ttgcaagggtatcggct

SEQ ID NO: 164380 - DNA, 17 bp, Arabidopsis thaliana
ttgcaagtccttggcag

SEQ ID NO: 164381 - DNA, 17 bp, Arabidopsis thaliana
ttgcaatccttggtggc

SEQ ID NO: 164382 - DNA, 17 bp, Arabidopsis thaliana
ttgcaatctcaacagtt

SEQ ID NO: 164383 - DNA, 17 bp, Arabidopsis thaliana
ttgcaatgcggttttga

SEQ ID NO: 164384 - DNA, 17 bp, Arabidopsis thaliana
ttgcaatgtttgcaaac

SEQ ID NO: 164385 - DNA, 17 bp, Arabidopsis thaliana
ttgcaattgctagccgt

SEQ ID NO: 164386 - DNA, 17 bp, Arabidopsis thaliana
ttgcaattgcttgccgt

SEQ ID NO: 164387 - DNA, 17 bp, Arabidopsis thaliana
ttgcaattttaccctcc

SEQ ID NO: 164388 - DNA, 17 bp, Arabidopsis thaliana
ttgcacaacaactacac

SEQ ID NO: 164389 - DNA, 17 bp, Arabidopsis thaliana
ttgcacaacatacatgg

SEQ ID NO: 164390 - DNA, 17 bp, Arabidopsis thaliana
ttgcacaagatcatttg

SEQ ID NO: 164391 - DNA, 17 bp, Arabidopsis thaliana
ttgcacacatcgatttg

SEQ ID NO: 164392 - DNA, 17 bp, Arabidopsis thaliana
ttgcacatccttggaca

SEQ ID NO: 164393 - DNA, 17 bp, Arabidopsis thaliana
ttgcaccaaccttctac

SEQ ID NO: 164394 - DNA, 17 bp, Arabidopsis thaliana
ttgcaccatcgggggtt

SEQ ID NO: 164395 - DNA, 17 bp, Arabidopsis thaliana
ttgcacccaagacccca

SEQ ID NO: 164396 - DNA, 17 bp, Arabidopsis thaliana
ttgcacccgctggttta

SEQ ID NO: 164397 - DNA, 17 bp, Arabidopsis thaliana
ttgcaccgcttgctcct

SEQ ID NO: 164398 - DNA, 17 bp, Arabidopsis thaliana
ttgcaccgctttgccca

SEQ ID NO: 164399 - DNA, 17 bp, Arabidopsis thaliana
ttgcacgaacgagaatg

SEQ ID NO: 164400 - DNA, 17 bp, Arabidopsis thaliana
ttgcacgactaacgagg

SEQ ID NO: 164401 - DNA, 17 bp, Arabidopsis thaliana
ttgcacgacttgtttag

SEQ ID NO: 164402 - DNA, 17 bp, Arabidopsis thaliana
ttgcacgatttgtttag

SEQ ID NO: 164403 - DNA, 17 bp, Arabidopsis thaliana
ttgcacgcagcgagctg

SEQ ID NO: 164404 - DNA, 17 bp, Arabidopsis thaliana
ttgcacgcaggtctaag

SEQ ID NO: 164405 - DNA, 17 bp, Arabidopsis thaliana
ttgcacggtgatacgaa

SEQ ID NO: 164406 - DNA, 17 bp, Arabidopsis thaliana
ttgcacgtctgcctggg

SEQ ID NO: 164407 - DNA, 17 bp, Arabidopsis thaliana
ttgcacgtttattggtt

SEQ ID NO: 164408 - DNA, 17 bp, Arabidopsis thaliana
ttgcactaggtttctgc

SEQ ID NO: 164409 - DNA, 17 bp, Arabidopsis thaliana
ttgcactatgtatcgaa

SEQ ID NO: 164410 - DNA, 17 bp, Arabidopsis thaliana
ttgcactctgaacggtt

SEQ ID NO: 164411 - DNA, 17 bp, Arabidopsis thaliana
ttgcactcttaacgctc

SEQ ID NO: 164412 - DNA, 17 bp, Arabidopsis thaliana
ttgcactgaaccgcttc

SEQ ID NO: 164413 - DNA, 17 bp, Arabidopsis thaliana
ttgcactgaaccttatg

SEQ ID NO: 164414 - DNA, 17 bp, Arabidopsis thaliana
ttgcactgctctatctg

SEQ ID NO: 164415 - DNA, 17 bp, Arabidopsis thaliana
ttgcactgtggccaaaa

SEQ ID NO: 164416 - DNA, 17 bp, Arabidopsis thaliana
ttgcactgttacataga

SEQ ID NO: 164417 - DNA, 17 bp, Arabidopsis thaliana
ttgcactgttacatgga

SEQ ID NO: 164418 - DNA, 17 bp, Arabidopsis thaliana
ttgcagaaaaggataca

SEQ ID NO: 164419 - DNA, 17 bp, Arabidopsis thaliana
ttgcagaacccattaag

SEQ ID NO: 164420 - DNA, 17 bp, Arabidopsis thaliana
ttgcagaagcagccgac

SEQ ID NO: 164421 - DNA, 17 bp, Arabidopsis thaliana
ttgcagaatcccgtgaa

SEQ ID NO: 164422 - DNA, 17 bp, Arabidopsis thaliana
ttgcagacagcaagatt

SEQ ID NO: 164423 - DNA, 17 bp, Arabidopsis thaliana
ttgcagaccagtttgac

SEQ ID NO: 164424 - DNA, 17 bp, Arabidopsis thaliana
ttgcagagactgtctcg

SEQ ID NO: 164425 - DNA, 17 bp, Arabidopsis thaliana
ttgcagagcactgggtg

SEQ ID NO: 164426 - DNA, 17 bp, Arabidopsis thaliana
ttgcagatatgtggtct

SEQ ID NO: 164427 - DNA, 17 bp, Arabidopsis thaliana
ttgcagatcaggtgacg

SEQ ID NO: 164428 - DNA, 17 bp, Arabidopsis thaliana
ttgcagcaacacaagtt

SEQ ID NO: 164429 - DNA, 17 bp, Arabidopsis thaliana
ttgcagccaaaaccaga

SEQ ID NO: 164430 - DNA, 17 bp, Arabidopsis thaliana
ttgcagccactttgtga

SEQ ID NO: 164431 - DNA, 17 bp, Arabidopsis thaliana
ttgcagccgtgacatga

SEQ ID NO: 164432 - DNA, 17 bp, Arabidopsis thaliana
ttgcagcgaattaaccg

SEQ ID NO: 164433 - DNA, 17 bp, Arabidopsis thaliana
ttgcagcgatgtctgtg

SEQ ID NO: 164434 - DNA, 17 bp, Arabidopsis thaliana
ttgcagcggattgttat

SEQ ID NO: 164435 - DNA, 17 bp, Arabidopsis thaliana
ttgcagctatggggtga

SEQ ID NO: 164436 - DNA, 17 bp, Arabidopsis thaliana
ttgcagctgcggagcca

SEQ ID NO: 164437 - DNA, 17 bp, Arabidopsis thaliana
ttgcaggacaagttcgg

SEQ ID NO: 164438 - DNA, 17 bp, Arabidopsis thaliana
ttgcaggagagatagcg

SEQ ID NO: 164439 - DNA, 17 bp, Arabidopsis thaliana
ttgcaggagtcaccgac

SEQ ID NO: 164440 - DNA, 17 bp, Arabidopsis thaliana
ttgcaggccacatccgt

SEQ ID NO: 164441 - DNA, 17 bp, Arabidopsis thaliana
ttgcaggctggcccgcg

SEQ ID NO: 164442 - DNA, 17 bp, Arabidopsis thaliana
ttgcaggcttcagattg

SEQ ID NO: 164443 - DNA, 17 bp, Arabidopsis thaliana
ttgcagggaccttgcaa

SEQ ID NO: 164444 - DNA, 17 bp, Arabidopsis thaliana
ttgcagtcacgatcaac

SEQ ID NO: 164445 - DNA, 17 bp, Arabidopsis thaliana
ttgcagtcatcccagga

SEQ ID NO: 164446 - DNA, 17 bp, Arabidopsis thaliana
ttgcagtctttggcgat

SEQ ID NO: 164447 - DNA, 17 bp, Arabidopsis thaliana
ttgcagtgataagactc

SEQ ID NO: 164448 - DNA, 17 bp, Arabidopsis thaliana
ttgcagtgattctgatc

SEQ ID NO: 164449 - DNA, 17 bp, Arabidopsis thaliana
ttgcagtgcggttttga

SEQ ID NO: 164450 - DNA, 17 bp, Arabidopsis thaliana
ttgcagttggtaccggt

SEQ ID NO: 164451 - DNA, 17 bp, Arabidopsis thaliana
ttgcagttgtaagtagc

SEQ ID NO: 164452 - DNA, 17 bp, Arabidopsis thaliana
ttgcagtttctatgaat

SEQ ID NO: 164453 - DNA, 17 bp, Arabidopsis thaliana
ttgcagtttgttaacct

SEQ ID NO: 164454 - DNA, 17 bp, Arabidopsis thaliana
ttgcataatgtctgtcc

SEQ ID NO: 164455 - DNA, 17 bp, Arabidopsis thaliana
ttgcatagatgtgcttc

SEQ ID NO: 164456 - DNA, 17 bp, Arabidopsis thaliana
ttgcatatctctgtgag

SEQ ID NO: 164457 - DNA, 17 bp, Arabidopsis thaliana
ttgcatgacgacaatcc

SEQ ID NO: 164458 - DNA, 17 bp, Arabidopsis thaliana
ttgcattaccatgaatg

SEQ ID NO: 164459 - DNA, 17 bp, Arabidopsis thaliana
ttgcattcccttcttga

SEQ ID NO: 164460 - DNA, 17 bp, Arabidopsis thaliana
ttgcattcgatctcaag

SEQ ID NO: 164461 - DNA, 17 bp, Arabidopsis thaliana
ttgcattcggacttgct

SEQ ID NO: 164462 - DNA, 17 bp, Arabidopsis thaliana
ttgcattctcagctttc

SEQ ID NO: 164463 - DNA, 17 bp, Arabidopsis thaliana
ttgcattctcagctttt

SEQ ID NO: 164464 - DNA, 17 bp, Arabidopsis thaliana
ttgcattgaagggagct

SEQ ID NO: 164465 - DNA, 17 bp, Arabidopsis thaliana
ttgcattgaatggactg

SEQ ID NO: 164466 - DNA, 17 bp, Arabidopsis thaliana
ttgcattgcaagtgtct

SEQ ID NO: 164467 - DNA, 17 bp, Arabidopsis thaliana
ttgcattgcagcggcag

SEQ ID NO: 164468 - DNA, 17 bp, Arabidopsis thaliana
ttgcattgcctgaacaa

SEQ ID NO: 164469 - DNA, 17 bp, Arabidopsis thaliana
ttgcattggattgtgac

SEQ ID NO: 164470 - DNA, 17 bp, Arabidopsis thaliana
ttgcattggtcgccttg

SEQ ID NO: 164471 - DNA, 17 bp, Arabidopsis thaliana
ttgcattggtgctgagg

SEQ ID NO: 164472 - DNA, 17 bp, Arabidopsis thaliana
ttgcatttctgtctatc

SEQ ID NO: 164473 - DNA, 17 bp, Arabidopsis thaliana
ttgcatttgttggagtc

SEQ ID NO: 164474 - DNA, 17 bp, Arabidopsis thaliana
ttgcattttcgtgattt

SEQ ID NO: 164475 - DNA, 17 bp, Arabidopsis thaliana
ttgcattttcgtgtgca

SEQ ID NO: 164476 - DNA, 17 bp, Arabidopsis thaliana
ttgcattttctggttgt

SEQ ID NO: 164477 - DNA, 17 bp, Arabidopsis thaliana
ttgccaaactgtgatct

SEQ ID NO: 164478 - DNA, 17 bp, Arabidopsis thaliana
ttgccaaccaatcctct

SEQ ID NO: 164479 - DNA, 17 bp, Arabidopsis thaliana
ttgccaaccatatcctt

SEQ ID NO: 164480 - DNA, 17 bp, Arabidopsis thaliana
ttgccaaccttcttctt

SEQ ID NO: 164481 - DNA, 17 bp, Arabidopsis thaliana
ttgccaactatcggcct

SEQ ID NO: 164482 - DNA, 17 bp, Arabidopsis thaliana
ttgccaagagcgtgaca

SEQ ID NO: 164483 - DNA, 17 bp, Arabidopsis thaliana
ttgccaaggatgacttg

SEQ ID NO: 164484 - DNA, 17 bp, Arabidopsis thaliana
ttgccaaggcctaccac

SEQ ID NO: 164485 - DNA, 17 bp, Arabidopsis thaliana
ttgccaaggtgagtcac

SEQ ID NO: 164486 - DNA, 17 bp, Arabidopsis thaliana
ttgccaaggttcagatc

SEQ ID NO: 164487 - DNA, 17 bp, Arabidopsis thaliana
ttgccaatcaggaatgt

SEQ ID NO: 164488 - DNA, 17 bp, Arabidopsis thaliana
ttgccaatttttctgta

SEQ ID NO: 164489 - DNA, 17 bp, Arabidopsis thaliana
ttgccacaactggaatt

SEQ ID NO: 164490 - DNA, 17 bp, Arabidopsis thaliana
ttgccacgaagatggaa

SEQ ID NO: 164491 - DNA, 17 bp, Arabidopsis thaliana
ttgccactgaagttgcc

SEQ ID NO: 164492 - DNA, 17 bp, Arabidopsis thaliana
ttgccagacaactgggt

SEQ ID NO: 164493 - DNA, 17 bp, Arabidopsis thaliana
ttgccagacactgggtg

SEQ ID NO: 164494 - DNA, 17 bp, Arabidopsis thaliana
ttgccagaccactcaaa

SEQ ID NO: 164495 - DNA, 17 bp, Arabidopsis thaliana
ttgccagacgcatttgc

SEQ ID NO: 164496 - DNA, 17 bp, Arabidopsis thaliana
ttgccagacggattgta

SEQ ID NO: 164497 - DNA, 17 bp, Arabidopsis thaliana
ttgccagcgatcagcga

SEQ ID NO: 164498 - DNA, 17 bp, Arabidopsis thaliana
ttgccaggagtggagcc

SEQ ID NO: 164499 - DNA, 17 bp, Arabidopsis thaliana
ttgccaggcagcctgac

SEQ ID NO: 164500 - DNA, 17 bp, Arabidopsis thaliana
ttgccaggttgtgtgag

SEQ ID NO: 164501 - DNA, 17 bp, Arabidopsis thaliana
ttgccagtcgacttccc

SEQ ID NO: 164502 - DNA, 17 bp, Arabidopsis thaliana
ttgccatcgattcactt

SEQ ID NO: 164503 - DNA, 17 bp, Arabidopsis thaliana
ttgccatcgtcctgtag

SEQ ID NO: 164504 - DNA, 17 bp, Arabidopsis thaliana
ttgccatgggaccaaac

SEQ ID NO: 164505 - DNA, 17 bp, Arabidopsis thaliana
ttgccatgtcgagtttg

SEQ ID NO: 164506 - DNA, 17 bp, Arabidopsis thaliana
ttgccattacgggctta

SEQ ID NO: 164507 - DNA, 17 bp, Arabidopsis thaliana
ttgccattactctgttg

SEQ ID NO: 164508 - DNA, 17 bp, Arabidopsis thaliana
ttgccattctgtcacca

SEQ ID NO: 164509 - DNA, 17 bp, Arabidopsis thaliana
ttgccattctttagcga

SEQ ID NO: 164510 - DNA, 17 bp, Arabidopsis thaliana
ttgccattctttagtta

SEQ ID NO: 164511 - DNA, 17 bp, Arabidopsis thaliana
ttgccattgccatccac

SEQ ID NO: 164512 - DNA, 17 bp, Arabidopsis thaliana
ttgccatttgccggtgg

SEQ ID NO: 164513 - DNA, 17 bp, Arabidopsis thaliana
ttgcccaacaaaaggaa

SEQ ID NO: 164514 - DNA, 17 bp, Arabidopsis thaliana
ttgcccacccacccacc

SEQ ID NO: 164515 - DNA, 17 bp, Arabidopsis thaliana
ttgcccacttgtgccca

SEQ ID NO: 164516 - DNA, 17 bp, Arabidopsis thaliana
ttgcccagactagtgct

SEQ ID NO: 164517 - DNA, 17 bp, Arabidopsis thaliana
ttgcccaggcactgact

SEQ ID NO: 164518 - DNA, 17 bp, Arabidopsis thaliana
ttgcccatgcgtcatcg

SEQ ID NO: 164519 - DNA, 17 bp, Arabidopsis thaliana
ttgcccctgctcggtag

SEQ ID NO: 164520 - DNA, 17 bp, Arabidopsis thaliana
ttgcccgagaggttaag

SEQ ID NO: 164521 - DNA, 17 bp, Arabidopsis thaliana
ttgcccgcgcaggttcg

SEQ ID NO: 164522 - DNA, 17 bp, Arabidopsis thaliana
ttgcccgcggcttctcc

SEQ ID NO: 164523 - DNA, 17 bp, Arabidopsis thaliana
ttgcccgcttgcaggtt

SEQ ID NO: 164524 - DNA, 17 bp, Arabidopsis thaliana
ttgcccggccgttgatc

SEQ ID NO: 164525 - DNA, 17 bp, Arabidopsis thaliana
ttgcccggtgctcaaca

SEQ ID NO: 164526 - DNA, 17 bp, Arabidopsis thaliana
ttgcccgtggctcaagt

SEQ ID NO: 164527 - DNA, 17 bp, Arabidopsis thaliana
ttgcccgttcatctcca

SEQ ID NO: 164528 - DNA, 17 bp, Arabidopsis thaliana
ttgccctacatggcggg

SEQ ID NO: 164529 - DNA, 17 bp, Arabidopsis thaliana
ttgccctactagtggat

SEQ ID NO: 164530 - DNA, 17 bp, Arabidopsis thaliana
ttgcccttccattgcaa

SEQ ID NO: 164531 - DNA, 17 bp, Arabidopsis thaliana
ttgcccttttctggttt

SEQ ID NO: 164532 - DNA, 17 bp, Arabidopsis thaliana
ttgccgaaggcttggct

SEQ ID NO: 164533 - DNA, 17 bp, Arabidopsis thaliana
ttgccgaaggcttgtct

SEQ ID NO: 164534 - DNA, 17 bp, Arabidopsis thaliana
ttgccgaagtaaggagt

SEQ ID NO: 164535 - DNA, 17 bp, Arabidopsis thaliana
ttgccgaagtcgaactc

SEQ ID NO: 164536 - DNA, 17 bp, Arabidopsis thaliana
ttgccgaattgaaccgt

SEQ ID NO: 164537 - DNA, 17 bp, Arabidopsis thaliana
ttgccgacatcactagc

SEQ ID NO: 164538 - DNA, 17 bp, Arabidopsis thaliana
ttgccgaccctcagtag

SEQ ID NO: 164539 - DNA, 17 bp, Arabidopsis thaliana
ttgccgaccctcagtat

SEQ ID NO: 164540 - DNA, 17 bp, Arabidopsis thaliana
ttgccgacgaacctccg

SEQ ID NO: 164541 - DNA, 17 bp, Arabidopsis thaliana
ttgccgacgtgtacaat

SEQ ID NO: 164542 - DNA, 17 bp, Arabidopsis thaliana
ttgccgacttagtttcc

SEQ ID NO: 164543 - DNA, 17 bp, Arabidopsis thaliana
ttgccgacttcccttgc

SEQ ID NO: 164544 - DNA, 17 bp, Arabidopsis thaliana
ttgccgactttagcccc

SEQ ID NO: 164545 - DNA, 17 bp, Arabidopsis thaliana
ttgccgactttgtgaaa

SEQ ID NO: 164546 - DNA, 17 bp, Arabidopsis thaliana
ttgccgcagccgttgcc

SEQ ID NO: 164547 - DNA, 17 bp, Arabidopsis thaliana
ttgccgctaccgctgcc

SEQ ID NO: 164548 - DNA, 17 bp, Arabidopsis thaliana
ttgccgctttggttttt

SEQ ID NO: 164549 - DNA, 17 bp, Arabidopsis thaliana
ttgccggatttggcgaa

SEQ ID NO: 164550 - DNA, 17 bp, Arabidopsis thaliana
ttgccggctcagaatgt

SEQ ID NO: 164551 - DNA, 17 bp, Arabidopsis thaliana
ttgccgtattggtgccg

SEQ ID NO: 164552 - DNA, 17 bp, Arabidopsis thaliana
ttgccgtctcctatgct

SEQ ID NO: 164553 - DNA, 17 bp, Arabidopsis thaliana
ttgccgtgatcgatgaa

SEQ ID NO: 164554 - DNA, 17 bp, Arabidopsis thaliana
ttgccgttggggaagaa

SEQ ID NO: 164555 - DNA, 17 bp, Arabidopsis thaliana
ttgccgtttgcctattg

SEQ ID NO: 164556 - DNA, 17 bp, Arabidopsis thaliana
ttgcctaaagcccattt

SEQ ID NO: 164557 - DNA, 17 bp, Arabidopsis thaliana
ttgcctaactgaattga

SEQ ID NO: 164558 - DNA, 17 bp, Arabidopsis thaliana
ttgcctcaaacttcctt

SEQ ID NO: 164559 - DNA, 17 bp, Arabidopsis thaliana
ttgcctcacactatttg

SEQ ID NO: 164560 - DNA, 17 bp, Arabidopsis thaliana
ttgcctcacctaggtgg

SEQ ID NO: 164561 - DNA, 17 bp, Arabidopsis thaliana
ttgcctcgataacatgt

SEQ ID NO: 164562 - DNA, 17 bp, Arabidopsis thaliana
ttgcctcggtttgcgta

SEQ ID NO: 164563 - DNA, 17 bp, Arabidopsis thaliana
ttgcctcgtgtcctcca

SEQ ID NO: 164564 - DNA, 17 bp, Arabidopsis thaliana
ttgcctctactttgtgt

SEQ ID NO: 164565 - DNA, 17 bp, Arabidopsis thaliana
ttgcctctagtgttcct

SEQ ID NO: 164566 - DNA, 17 bp, Arabidopsis thaliana
ttgcctctccagtaccg

SEQ ID NO: 164567 - DNA, 17 bp, Arabidopsis thaliana
ttgcctctgaaattatt

SEQ ID NO: 164568 - DNA, 17 bp, Arabidopsis thaliana
ttgcctctgatggttta

SEQ ID NO: 164569 - DNA, 17 bp, Arabidopsis thaliana
ttgcctctgctgtcgtc

SEQ ID NO: 164570 - DNA, 17 bp, Arabidopsis thaliana
ttgcctgactgggagct

SEQ ID NO: 164571 - DNA, 17 bp, Arabidopsis thaliana
ttgcctgactgggcgct

SEQ ID NO: 164572 - DNA, 17 bp, Arabidopsis thaliana
ttgcctgctgaatggcc

SEQ ID NO: 164573 - DNA, 17 bp, Arabidopsis thaliana
ttgcctgtgatgggtgg

SEQ ID NO: 164574 - DNA, 17 bp, Arabidopsis thaliana
ttgccttacttgtcggc

SEQ ID NO: 164575 - DNA, 17 bp, Arabidopsis thaliana
ttgccttcagagacgag

SEQ ID NO: 164576 - DNA, 17 bp, Arabidopsis thaliana
ttgccttccaagcaata

SEQ ID NO: 164577 - DNA, 17 bp, Arabidopsis thaliana
ttgccttccgacattgc

SEQ ID NO: 164578 - DNA, 17 bp, Arabidopsis thaliana
ttgccttccgtcagaag

SEQ ID NO: 164579 - DNA, 17 bp, Arabidopsis thaliana
ttgccttgaggcacggc

SEQ ID NO: 164580 - DNA, 17 bp, Arabidopsis thaliana
ttgccttgctatttcct

SEQ ID NO: 164581 - DNA, 17 bp, Arabidopsis thaliana
ttgccttgtgattccgt

SEQ ID NO: 164582 - DNA, 17 bp, Arabidopsis thaliana
ttgccttgttgcctctg

SEQ ID NO: 164583 - DNA, 17 bp, Arabidopsis thaliana
ttgcctttcggcttacg

SEQ ID NO: 164584 - DNA, 17 bp, Arabidopsis thaliana
ttgcgaaaaagctgtag

SEQ ID NO: 164585 - DNA, 17 bp, Arabidopsis thaliana
ttgcgaaagcggacaat

SEQ ID NO: 164586 - DNA, 17 bp, Arabidopsis thaliana
ttgcgaaatcggttgca

SEQ ID NO: 164587 - DNA, 17 bp, Arabidopsis thaliana
ttgcgaaatgccctcca

SEQ ID NO: 164588 - DNA, 17 bp, Arabidopsis thaliana
ttgcgaagacaattgcg

SEQ ID NO: 164589 - DNA, 17 bp, Arabidopsis thaliana
ttgcgaagaggagttaa

SEQ ID NO: 164590 - DNA, 17 bp, Arabidopsis thaliana
ttgcgaagtccactaag

SEQ ID NO: 164591 - DNA, 17 bp, Arabidopsis thaliana
ttgcgaagtttgtcagt

SEQ ID NO: 164592 - DNA, 17 bp, Arabidopsis thaliana
ttgcgaataccgaatcc

SEQ ID NO: 164593 - DNA, 17 bp, Arabidopsis thaliana
ttgcgaatatccgcttt

SEQ ID NO: 164594 - DNA, 17 bp, Arabidopsis thaliana
ttgcgaatatggcacag

SEQ ID NO: 164595 - DNA, 17 bp, Arabidopsis thaliana
ttgcgaatggtgattgc

SEQ ID NO: 164596 - DNA, 17 bp, Arabidopsis thaliana
ttgcgaatgtcgttttg

SEQ ID NO: 164597 - DNA, 17 bp, Arabidopsis thaliana
ttgcgacacgtgtcttc

SEQ ID NO: 164598 - DNA, 17 bp, Arabidopsis thaliana
ttgcgaccaccgttcta

SEQ ID NO: 164599 - DNA, 17 bp, Arabidopsis thaliana
ttgcgaccactagacca

SEQ ID NO: 164600 - DNA, 17 bp, Arabidopsis thaliana
ttgcgacccagattact

SEQ ID NO: 164601 - DNA, 17 bp, Arabidopsis thaliana
ttgcgaccctcagtagg

SEQ ID NO: 164602 - DNA, 17 bp, Arabidopsis thaliana
ttgcgacgaattacagt

SEQ ID NO: 164603 - DNA, 17 bp, Arabidopsis thaliana
ttgcgacgcggattacg

SEQ ID NO: 164604 - DNA, 17 bp, Arabidopsis thaliana
ttgcgacggatcgcatg

SEQ ID NO: 164605 - DNA, 17 bp, Arabidopsis thaliana
ttgcgacggatttgtta

SEQ ID NO: 164606 - DNA, 17 bp, Arabidopsis thaliana
ttgcgactccggcgacg

SEQ ID NO: 164607 - DNA, 17 bp, Arabidopsis thaliana
ttgcgactccttggcag

SEQ ID NO: 164608 - DNA, 17 bp, Arabidopsis thaliana
ttgcgactgtgtcaact

SEQ ID NO: 164609 - DNA, 17 bp, Arabidopsis thaliana
ttgcgacttcccttttg

SEQ ID NO: 164610 - DNA, 17 bp, Arabidopsis thaliana
ttgcgagaagtctgcgt

SEQ ID NO: 164611 - DNA, 17 bp, Arabidopsis thaliana
ttgcgagacaagtgcgg

SEQ ID NO: 164612 - DNA, 17 bp, Arabidopsis thaliana
ttgcgagacagatttgg

SEQ ID NO: 164613 - DNA, 17 bp, Arabidopsis thaliana
ttgcgagagggcggtct

SEQ ID NO: 164614 - DNA, 17 bp, Arabidopsis thaliana
ttgcgagcagtagcgat

SEQ ID NO: 164615 - DNA, 17 bp, Arabidopsis thaliana
ttgcgagcggtagcggt

SEQ ID NO: 164616 - DNA, 17 bp, Arabidopsis thaliana
ttgcgaggaacagcgct

SEQ ID NO: 164617 - DNA, 17 bp, Arabidopsis thaliana
ttgcgaggcgttgtcgt

SEQ ID NO: 164618 - DNA, 17 bp, Arabidopsis thaliana
ttgcgaggcgttgtggt

SEQ ID NO: 164619 - DNA, 17 bp, Arabidopsis thaliana
ttgcgagggaccttttc

SEQ ID NO: 164620 - DNA, 17 bp, Arabidopsis thaliana
ttgcgagggtaaaagtt

SEQ ID NO: 164621 - DNA, 17 bp, Arabidopsis thaliana
ttgcgatctgcttctgt

SEQ ID NO: 164622 - DNA, 17 bp, Arabidopsis thaliana
ttgcgatgaagcttttg

SEQ ID NO: 164623 - DNA, 17 bp, Arabidopsis thaliana
ttgcgatgactttgcga

SEQ ID NO: 164624 - DNA, 17 bp, Arabidopsis thaliana
ttgcgatggatttgcaa

SEQ ID NO: 164625 - DNA, 17 bp, Arabidopsis thaliana
ttgcgatggtccacaaa

SEQ ID NO: 164626 - DNA, 17 bp, Arabidopsis thaliana
ttgcgatggtccctgcg

SEQ ID NO: 164627 - DNA, 17 bp, Arabidopsis thaliana
ttgcgatggtcctcgcg

SEQ ID NO: 164628 - DNA, 17 bp, Arabidopsis thaliana
ttgcgatggttcctgcg

SEQ ID NO: 164629 - DNA, 17 bp, Arabidopsis thaliana
ttgcgattacgggttgg

SEQ ID NO: 164630 - DNA, 17 bp, Arabidopsis thaliana
ttgcgattatctcaatt

SEQ ID NO: 164631 - DNA, 17 bp, Arabidopsis thaliana
ttgcgattatgttgtct

SEQ ID NO: 164632 - DNA, 17 bp, Arabidopsis thaliana
ttgcgattcattttggt

SEQ ID NO: 164633 - DNA, 17 bp, Arabidopsis thaliana
ttgcgattctgcaggta

SEQ ID NO: 164634 - DNA, 17 bp, Arabidopsis thaliana
ttgcgattgctcgcacg

SEQ ID NO: 164635 - DNA, 17 bp, Arabidopsis thaliana
ttgcgattgtacggggg

SEQ ID NO: 164636 - DNA, 17 bp, Arabidopsis thaliana
ttgcgatttactggtat

SEQ ID NO: 164637 - DNA, 17 bp, Arabidopsis thaliana
ttgcgatttagcgacgg

SEQ ID NO: 164638 - DNA, 17 bp, Arabidopsis thaliana
ttgcgatttctccatgg

SEQ ID NO: 164639 - DNA, 17 bp, Arabidopsis thaliana
ttgcgcaagcggaatct

SEQ ID NO: 164640 - DNA, 17 bp, Arabidopsis thaliana
ttgcgcacgaaataccg

SEQ ID NO: 164641 - DNA, 17 bp, Arabidopsis thaliana
ttgcgcactatctttca

SEQ ID NO: 164642 - DNA, 17 bp, Arabidopsis thaliana
ttgcgcagcgggtgcgg

SEQ ID NO: 164643 - DNA, 17 bp, Arabidopsis thaliana
ttgcgcaggttctctac

SEQ ID NO: 164644 - DNA, 17 bp, Arabidopsis thaliana
ttgcgcagtaagctagt

SEQ ID NO: 164645 - DNA, 17 bp, Arabidopsis thaliana
ttgcgcagtgtgtctct

SEQ ID NO: 164646 - DNA, 17 bp, Arabidopsis thaliana
ttgcgcatcctgtagat

SEQ ID NO: 164647 - DNA, 17 bp, Arabidopsis thaliana
ttgcgccaagttatccg

SEQ ID NO: 164648 - DNA, 17 bp, Arabidopsis thaliana
ttgcgccaagttgttat

SEQ ID NO: 164649 - DNA, 17 bp, Arabidopsis thaliana
ttgcgccatcaaggtag

SEQ ID NO: 164650 - DNA, 17 bp, Arabidopsis thaliana
ttgcgccccaagccttc

SEQ ID NO: 164651 - DNA, 17 bp, Arabidopsis thaliana
ttgcgccgaagatgaac

SEQ ID NO: 164652 - DNA, 17 bp, Arabidopsis thaliana
ttgcgccgattctgtca

SEQ ID NO: 164653 - DNA, 17 bp, Arabidopsis thaliana
ttgcgcctgggaaatta

SEQ ID NO: 164654 - DNA, 17 bp, Arabidopsis thaliana
ttgcgctacgggagaaa

SEQ ID NO: 164655 - DNA, 17 bp, Arabidopsis thaliana
ttgcgctgatttgattg

SEQ ID NO: 164656 - DNA, 17 bp, Arabidopsis thaliana
ttgcgctgcgattttgg

SEQ ID NO: 164657 - DNA, 17 bp, Arabidopsis thaliana
ttgcgcttggtgtggtg

SEQ ID NO: 164658 - DNA, 17 bp, Arabidopsis thaliana
ttgcgcttgttaaccat

SEQ ID NO: 164659 - DNA, 17 bp, Arabidopsis thaliana
ttgcgcttgttaacctt

SEQ ID NO: 164660 - DNA, 17 bp, Arabidopsis thaliana
ttgcggaaaatgtgatt

SEQ ID NO: 164661 - DNA, 17 bp, Arabidopsis thaliana
ttgcggaaacaggcggt

SEQ ID NO: 164662 - DNA, 17 bp, Arabidopsis thaliana
ttgcggaaacgggcggt

SEQ ID NO: 164663 - DNA, 17 bp, Arabidopsis thaliana
ttgcggaaatcgtccag

SEQ ID NO: 164664 - DNA, 17 bp, Arabidopsis thaliana
ttgcggaacgccaccgg

SEQ ID NO: 164665 - DNA, 17 bp, Arabidopsis thaliana
ttgcggaatactgtgtg

SEQ ID NO: 164666 - DNA, 17 bp, Arabidopsis thaliana
ttgcggaattgtggcgg

SEQ ID NO: 164667 - DNA, 17 bp, Arabidopsis thaliana
ttgcggacaagcccgtt

SEQ ID NO: 164668 - DNA, 17 bp, Arabidopsis thaliana
ttgcggaccaagtttat

SEQ ID NO: 164669 - DNA, 17 bp, Arabidopsis thaliana
ttgcggacggttaggtt

SEQ ID NO: 164670 - DNA, 17 bp, Arabidopsis thaliana
ttgcggacgttacggta

SEQ ID NO: 164671 - DNA, 17 bp, Arabidopsis thaliana
ttgcggactaactgcag

SEQ ID NO: 164672 - DNA, 17 bp, Arabidopsis thaliana
ttgcggactgcgggtat

SEQ ID NO: 164673 - DNA, 17 bp, Arabidopsis thaliana
ttgcggactgggaacgg

SEQ ID NO: 164674 - DNA, 17 bp, Arabidopsis thaliana
ttgcggactgttcagac

SEQ ID NO: 164675 - DNA, 17 bp, Arabidopsis thaliana
ttgcggagatgtcgtca

SEQ ID NO: 164676 - DNA, 17 bp, Arabidopsis thaliana
ttgcggatcgcatatct

SEQ ID NO: 164677 - DNA, 17 bp, Arabidopsis thaliana
ttgcggatgaattagct

SEQ ID NO: 164678 - DNA, 17 bp, Arabidopsis thaliana
ttgcggcccgagttggt

SEQ ID NO: 164679 - DNA, 17 bp, Arabidopsis thaliana
ttgcggcgacgtgggtg

SEQ ID NO: 164680 - DNA, 17 bp, Arabidopsis thaliana
ttgcggcggaaaagtat

SEQ ID NO: 164681 - DNA, 17 bp, Arabidopsis thaliana
ttgcggcggaggagctc

SEQ ID NO: 164682 - DNA, 17 bp, Arabidopsis thaliana
ttgcggcgtctggattt

SEQ ID NO: 164683 - DNA, 17 bp, Arabidopsis thaliana
ttgcggcgttgtgcctg

SEQ ID NO: 164684 - DNA, 17 bp, Arabidopsis thaliana
ttgcggctgcggttacg

SEQ ID NO: 164685 - DNA, 17 bp, Arabidopsis thaliana
ttgcggctggaacagag

SEQ ID NO: 164686 - DNA, 17 bp, Arabidopsis thaliana
ttgcgggaagccgagat

SEQ ID NO: 164687 - DNA, 17 bp, Arabidopsis thaliana
ttgcgggacaagtgcgg

SEQ ID NO: 164688 - DNA, 17 bp, Arabidopsis thaliana
ttgcgggacgggtttga

SEQ ID NO: 164689 - DNA, 17 bp, Arabidopsis thaliana
ttgcgggagaagccaat

SEQ ID NO: 164690 - DNA, 17 bp, Arabidopsis thaliana
ttgcgggagtttgcgaa

SEQ ID NO: 164691 - DNA, 17 bp, Arabidopsis thaliana
ttgcgggagttttagca

SEQ ID NO: 164692 - DNA, 17 bp, Arabidopsis thaliana
ttgcgggcggtagcggt

SEQ ID NO: 164693 - DNA, 17 bp, Arabidopsis thaliana
ttgcgggcgttagcggt

SEQ ID NO: 164694 - DNA, 17 bp, Arabidopsis thaliana
ttgcgggctgaccacag

SEQ ID NO: 164695 - DNA, 17 bp, Arabidopsis thaliana
ttgcgggctttggcatg

SEQ ID NO: 164696 - DNA, 17 bp, Arabidopsis thaliana
ttgcggggttaaagttt

SEQ ID NO: 164697 - DNA, 17 bp, Arabidopsis thaliana
ttgcgggtagcagattc

SEQ ID NO: 164698 - DNA, 17 bp, Arabidopsis thaliana
ttgcgggtggtagcggt

SEQ ID NO: 164699 - DNA, 17 bp, Arabidopsis thaliana
ttgcggtaggtgtgatg

SEQ ID NO: 164700 - DNA, 17 bp, Arabidopsis thaliana
ttgcggtccgcctttgg

SEQ ID NO: 164701 - DNA, 17 bp, Arabidopsis thaliana
ttgcggtcgctggcaac

SEQ ID NO: 164702 - DNA, 17 bp, Arabidopsis thaliana
ttgcggtgcggaagaag

SEQ ID NO: 164703 - DNA, 17 bp, Arabidopsis thaliana
ttgcggtgcgggagaag

SEQ ID NO: 164704 - DNA, 17 bp, Arabidopsis thaliana
ttgcggtgcggttttga

SEQ ID NO: 164705 - DNA, 17 bp, Arabidopsis thaliana
ttgcggtggcacttaga

SEQ ID NO: 164706 - DNA, 17 bp, Arabidopsis thaliana
ttgcggtggcggcctaa

SEQ ID NO: 164707 - DNA, 17 bp, Arabidopsis thaliana
ttgcggtggtacagaca

SEQ ID NO: 164708 - DNA, 17 bp, Arabidopsis thaliana
ttgcggtggtacagcca

SEQ ID NO: 164709 - DNA, 17 bp, Arabidopsis thaliana
ttgcggttactcctact

SEQ ID NO: 164710 - DNA, 17 bp, Arabidopsis thaliana
ttgcggttatgcggtgc

SEQ ID NO: 164711 - DNA, 17 bp, Arabidopsis thaliana
ttgcggttcaactgcgg

SEQ ID NO: 164712 - DNA, 17 bp, Arabidopsis thaliana
ttgcggttcgtaataag

SEQ ID NO: 164713 - DNA, 17 bp, Arabidopsis thaliana
ttgcggttgcaaacgat

SEQ ID NO: 164714 - DNA, 17 bp, Arabidopsis thaliana
ttgcggttgcgagcggt

SEQ ID NO: 164715 - DNA, 17 bp, Arabidopsis thaliana
ttgcggttgcgggcagt

SEQ ID NO: 164716 - DNA, 17 bp, Arabidopsis thaliana
ttgcggttgcgggcggt

SEQ ID NO: 164717 - DNA, 17 bp, Arabidopsis thaliana
ttgcggttgtggacggt

SEQ ID NO: 164718 - DNA, 17 bp, Arabidopsis thaliana
ttgcgtaaaaatttcag

SEQ ID NO: 164719 - DNA, 17 bp, Arabidopsis thaliana
ttgcgtacccgggctca

SEQ ID NO: 164720 - DNA, 17 bp, Arabidopsis thaliana
ttgcgtactgcaggtct

SEQ ID NO: 164721 - DNA, 17 bp, Arabidopsis thaliana
ttgcgtatccagactag

SEQ ID NO: 164722 - DNA, 17 bp, Arabidopsis thaliana
ttgcgtcaaagttgcga

SEQ ID NO: 164723 - DNA, 17 bp, Arabidopsis thaliana
ttgcgtcaactcattgg

SEQ ID NO: 164724 - DNA, 17 bp, Arabidopsis thaliana
ttgcgtcaagctgcgat

SEQ ID NO: 164725 - DNA, 17 bp, Arabidopsis thaliana
ttgcgtcacgatcaatt

SEQ ID NO: 164726 - DNA, 17 bp, Arabidopsis thaliana
ttgcgtcctcaaaccaa

SEQ ID NO: 164727 - DNA, 17 bp, Arabidopsis thaliana
ttgcgtcctctagcaga

SEQ ID NO: 164728 - DNA, 17 bp, Arabidopsis thaliana
ttgcgtcgttgtgcctg

SEQ ID NO: 164729 - DNA, 17 bp, Arabidopsis thaliana
ttgcgtcgttgtgcctt

SEQ ID NO: 164730 - DNA, 17 bp, Arabidopsis thaliana
ttgcgtctaatatcgcc

SEQ ID NO: 164731 - DNA, 17 bp, Arabidopsis thaliana
ttgcgtctagctcagtt

SEQ ID NO: 164732 - DNA, 17 bp, Arabidopsis thaliana
ttgcgtctgcctgggtg

SEQ ID NO: 164733 - DNA, 17 bp, Arabidopsis thaliana
ttgcgtcttatttccga

SEQ ID NO: 164734 - DNA, 17 bp, Arabidopsis thaliana
ttgcgtcttatttccta

SEQ ID NO: 164735 - DNA, 17 bp, Arabidopsis thaliana
ttgcgtcttcgtggtgg

SEQ ID NO: 164736 - DNA, 17 bp, Arabidopsis thaliana
ttgcgtgacctcgtgtt

SEQ ID NO: 164737 - DNA, 17 bp, Arabidopsis thaliana
ttgcgtgagacaggtta

SEQ ID NO: 164738 - DNA, 17 bp, Arabidopsis thaliana
ttgcgtgcgggtgtgag

SEQ ID NO: 164739 - DNA, 17 bp, Arabidopsis thaliana
ttgcgtgcttgggcgag

SEQ ID NO: 164740 - DNA, 17 bp, Arabidopsis thaliana
ttgcgttagtttgcgaa

SEQ ID NO: 164741 - DNA, 17 bp, Arabidopsis thaliana
ttgcgttagtttgcgga

SEQ ID NO: 164742 - DNA, 17 bp, Arabidopsis thaliana
ttgcgttagtttgctaa

SEQ ID NO: 164743 - DNA, 17 bp, Arabidopsis thaliana
ttgcgttcaccgtcggt

SEQ ID NO: 164744 - DNA, 17 bp, Arabidopsis thaliana
ttgcgttcggaggatct

SEQ ID NO: 164745 - DNA, 17 bp, Arabidopsis thaliana
ttgcgttcggcgggacc

SEQ ID NO: 164746 - DNA, 17 bp, Arabidopsis thaliana
ttgcgttcggcgggacg

SEQ ID NO: 164747 - DNA, 17 bp, Arabidopsis thaliana
ttgcgttcgtgaagttg

SEQ ID NO: 164748 - DNA, 17 bp, Arabidopsis thaliana
ttgcgttctatgctgtt

SEQ ID NO: 164749 - DNA, 17 bp, Arabidopsis thaliana
ttgcgttctcaagagca

SEQ ID NO: 164750 - DNA, 17 bp, Arabidopsis thaliana
ttgcgttctgattcctg

SEQ ID NO: 164751 - DNA, 17 bp, Arabidopsis thaliana
ttgcgttgacattttgt

SEQ ID NO: 164752 - DNA, 17 bp, Arabidopsis thaliana
ttgctaaaatggctgca

SEQ ID NO: 164753 - DNA, 17 bp, Arabidopsis thaliana
ttgctaaaccggttcga

SEQ ID NO: 164754 - DNA, 17 bp, Arabidopsis thaliana
ttgctaaaccgtggagt

SEQ ID NO: 164755 - DNA, 17 bp, Arabidopsis thaliana
ttgctaaacgactcgtc

SEQ ID NO: 164756 - DNA, 17 bp, Arabidopsis thaliana
ttgctaaagccatctgt

SEQ ID NO: 164757 - DNA, 17 bp, Arabidopsis thaliana
ttgctaaatccctaaat

SEQ ID NO: 164758 - DNA, 17 bp, Arabidopsis thaliana
ttgctaaatttgtgcag

SEQ ID NO: 164759 - DNA, 17 bp, Arabidopsis thaliana
ttgctaacagaggctcc

SEQ ID NO: 164760 - DNA, 17 bp, Arabidopsis thaliana
ttgctaactcacgtgat

SEQ ID NO: 164761 - DNA, 17 bp, Arabidopsis thaliana
ttgctaaggtttcggtc

SEQ ID NO: 164762 - DNA, 17 bp, Arabidopsis thaliana
ttgctaagttgttcgtt

SEQ ID NO: 164763 - DNA, 17 bp, Arabidopsis thaliana
ttgctaatacgggtttc

SEQ ID NO: 164764 - DNA, 17 bp, Arabidopsis thaliana
ttgctaatagccagcct

SEQ ID NO: 164765 - DNA, 17 bp, Arabidopsis thaliana
ttgctaatcatcagatc

SEQ ID NO: 164766 - DNA, 17 bp, Arabidopsis thaliana
ttgctaatccatcagca

SEQ ID NO: 164767 - DNA, 17 bp, Arabidopsis thaliana
ttgctaatccgtcgcaa

SEQ ID NO: 164768 - DNA, 17 bp, Arabidopsis thaliana
ttgctaattccattccg

SEQ ID NO: 164769 - DNA, 17 bp, Arabidopsis thaliana
ttgctacgccacgtcat

SEQ ID NO: 164770 - DNA, 17 bp, Arabidopsis thaliana
ttgctactggtttgact

SEQ ID NO: 164771 - DNA, 17 bp, Arabidopsis thaliana
ttgctacttcaccaagc

SEQ ID NO: 164772 - DNA, 17 bp, Arabidopsis thaliana
ttgctacttcttggttg

SEQ ID NO: 164773 - DNA, 17 bp, Arabidopsis thaliana
ttgctagagaagttgat

SEQ ID NO: 164774 - DNA, 17 bp, Arabidopsis thaliana
ttgctatctgggctttc

SEQ ID NO: 164775 - DNA, 17 bp, Arabidopsis thaliana
ttgctatctttacagtt

SEQ ID NO: 164776 - DNA, 17 bp, Arabidopsis thaliana
ttgctatgactaagctg

SEQ ID NO: 164777 - DNA, 17 bp, Arabidopsis thaliana
ttgctatggctatccac

SEQ ID NO: 164778 - DNA, 17 bp, Arabidopsis thaliana
ttgctatggtgccatca

SEQ ID NO: 164779 - DNA, 17 bp, Arabidopsis thaliana
ttgctatgtcacgtttc

SEQ ID NO: 164780 - DNA, 17 bp, Arabidopsis thaliana
ttgctatgtttgcggat

SEQ ID NO: 164781 - DNA, 17 bp, Arabidopsis thaliana
ttgctattagctcagtg

SEQ ID NO: 164782 - DNA, 17 bp, Arabidopsis thaliana
ttgctatttgcggatga

SEQ ID NO: 164783 - DNA, 17 bp, Arabidopsis thaliana
ttgctcaagacttggat

SEQ ID NO: 164784 - DNA, 17 bp, Arabidopsis thaliana
ttgctcaccgacttcct

SEQ ID NO: 164785 - DNA, 17 bp, Arabidopsis thaliana
ttgctcacctcctgcgt

SEQ ID NO: 164786 - DNA, 17 bp, Arabidopsis thaliana
ttgctcacctgagactg

SEQ ID NO: 164787 - DNA, 17 bp, Arabidopsis thaliana
ttgctcacgtgacggct

SEQ ID NO: 164788 - DNA, 17 bp, Arabidopsis thaliana
ttgctcactacgaccag

SEQ ID NO: 164789 - DNA, 17 bp, Arabidopsis thaliana
ttgctcactggcgtcgg

SEQ ID NO: 164790 - DNA, 17 bp, Arabidopsis thaliana
ttgctcagaattacagg

SEQ ID NO: 164791 - DNA, 17 bp, Arabidopsis thaliana
ttgctcagaattgacca

SEQ ID NO: 164792 - DNA, 17 bp, Arabidopsis thaliana
ttgctcaggataccctt

SEQ ID NO: 164793 - DNA, 17 bp, Arabidopsis thaliana
ttgctcataggactccg

SEQ ID NO: 164794 - DNA, 17 bp, Arabidopsis thaliana
ttgctcatctacaactg

SEQ ID NO: 164795 - DNA, 17 bp, Arabidopsis thaliana
ttgctcatcttcagcat

SEQ ID NO: 164796 - DNA, 17 bp, Arabidopsis thaliana
ttgctccaaccagaaaa

SEQ ID NO: 164797 - DNA, 17 bp, Arabidopsis thaliana
ttgctccagcacaaaca

SEQ ID NO: 164798 - DNA, 17 bp, Arabidopsis thaliana
ttgctccaggtcatcac

SEQ ID NO: 164799 - DNA, 17 bp, Arabidopsis thaliana
ttgctcctctgactgcc

SEQ ID NO: 164800 - DNA, 17 bp, Arabidopsis thaliana
ttgctcctttactctgt

SEQ ID NO: 164801 - DNA, 17 bp, Arabidopsis thaliana
ttgctcgaaccgaagtt

SEQ ID NO: 164802 - DNA, 17 bp, Arabidopsis thaliana
ttgctcgaagtgaaccg

SEQ ID NO: 164803 - DNA, 17 bp, Arabidopsis thaliana
ttgctcgacagactaac

SEQ ID NO: 164804 - DNA, 17 bp, Arabidopsis thaliana
ttgctcgaccgagtgct

SEQ ID NO: 164805 - DNA, 17 bp, Arabidopsis thaliana
ttgctcgagggacatga

SEQ ID NO: 164806 - DNA, 17 bp, Arabidopsis thaliana
ttgctcgatgtaggctt

SEQ ID NO: 164807 - DNA, 17 bp, Arabidopsis thaliana
ttgctcgattacaagct

SEQ ID NO: 164808 - DNA, 17 bp, Arabidopsis thaliana
ttgctcgcggtggtaca

SEQ ID NO: 164809 - DNA, 17 bp, Arabidopsis thaliana
ttgctcgcggtggtcca

SEQ ID NO: 164810 - DNA, 17 bp, Arabidopsis thaliana
ttgctcggattagtcca

SEQ ID NO: 164811 - DNA, 17 bp, Arabidopsis thaliana
ttgctcggctaagattg

SEQ ID NO: 164812 - DNA, 17 bp, Arabidopsis thaliana
ttgctcgtatcaagacg

SEQ ID NO: 164813 - DNA, 17 bp, Arabidopsis thaliana
ttgctctaaccagaaaa

SEQ ID NO: 164814 - DNA, 17 bp, Arabidopsis thaliana
ttgctctcgcagaccga

SEQ ID NO: 164815 - DNA, 17 bp, Arabidopsis thaliana
ttgctctctcggtttag

SEQ ID NO: 164816 - DNA, 17 bp, Arabidopsis thaliana
ttgctctctctaaagcc

SEQ ID NO: 164817 - DNA, 17 bp, Arabidopsis thaliana
ttgctctctctctggtc

SEQ ID NO: 164818 - DNA, 17 bp, Arabidopsis thaliana
ttgctctctgaactttg

SEQ ID NO: 164819 - DNA, 17 bp, Arabidopsis thaliana
ttgctctgacctgaaca

SEQ ID NO: 164820 - DNA, 17 bp, Arabidopsis thaliana
ttgctctgattctctgg

SEQ ID NO: 164821 - DNA, 17 bp, Arabidopsis thaliana
ttgctctgcgattgcgt

SEQ ID NO: 164822 - DNA, 17 bp, Arabidopsis thaliana
ttgctcttaactgtgtg

SEQ ID NO: 164823 - DNA, 17 bp, Arabidopsis thaliana
ttgctcttcgcctgctc

SEQ ID NO: 164824 - DNA, 17 bp, Arabidopsis thaliana
ttgctcttgccaaacgc

SEQ ID NO: 164825 - DNA, 17 bp, Arabidopsis thaliana
ttgctcttgcgaagaaa

SEQ ID NO: 164826 - DNA, 17 bp, Arabidopsis thaliana
ttgctcttggaccgcgc

SEQ ID NO: 164827 - DNA, 17 bp, Arabidopsis thaliana
ttgctcttggcgtttgg

SEQ ID NO: 164828 - DNA, 17 bp, Arabidopsis thaliana
ttgctcttttggcatta

SEQ ID NO: 164829 - DNA, 17 bp, Arabidopsis thaliana
ttgctgaactaggtttc

SEQ ID NO: 164830 - DNA, 17 bp, Arabidopsis thaliana
ttgctgacagcccagct

SEQ ID NO: 164831 - DNA, 17 bp, Arabidopsis thaliana
ttgctgaccgcctgtcg

SEQ ID NO: 164832 - DNA, 17 bp, Arabidopsis thaliana
ttgctgactcagctgac

SEQ ID NO: 164833 - DNA, 17 bp, Arabidopsis thaliana
ttgctgactcgcccaag

SEQ ID NO: 164834 - DNA, 17 bp, Arabidopsis thaliana
ttgctgactcgctcacg

SEQ ID NO: 164835 - DNA, 17 bp, Arabidopsis thaliana
ttgctgagaaaaagcaa

SEQ ID NO: 164836 - DNA, 17 bp, Arabidopsis thaliana
ttgctgagaaaaagcca

SEQ ID NO: 164837 - DNA, 17 bp, Arabidopsis thaliana
ttgctgagaatgccctt

SEQ ID NO: 164838 - DNA, 17 bp, Arabidopsis thaliana
ttgctgagccgcgaacg

SEQ ID NO: 164839 - DNA, 17 bp, Arabidopsis thaliana
ttgctgagcctcctcgg

SEQ ID NO: 164840 - DNA, 17 bp, Arabidopsis thaliana
ttgctgagcttaaagat

SEQ ID NO: 164841 - DNA, 17 bp, Arabidopsis thaliana
ttgctgaggtacaaggt

SEQ ID NO: 164842 - DNA, 17 bp, Arabidopsis thaliana
ttgctgattctggaccg

SEQ ID NO: 164843 - DNA, 17 bp, Arabidopsis thaliana
ttgctgatttaacgcca

SEQ ID NO: 164844 - DNA, 17 bp, Arabidopsis thaliana
ttgctgcagtggacacg

SEQ ID NO: 164845 - DNA, 17 bp, Arabidopsis thaliana
ttgctgccaaattagga

SEQ ID NO: 164846 - DNA, 17 bp, Arabidopsis thaliana
ttgctgccacgatccac

SEQ ID NO: 164847 - DNA, 17 bp, Arabidopsis thaliana
ttgctgccacgattttg

SEQ ID NO: 164848 - DNA, 17 bp, Arabidopsis thaliana
ttgctgccagcttttgt

SEQ ID NO: 164849 - DNA, 17 bp, Arabidopsis thaliana
ttgctgccgcttcatct

SEQ ID NO: 164850 - DNA, 17 bp, Arabidopsis thaliana
ttgctgcctgaagtttt

SEQ ID NO: 164851 - DNA, 17 bp, Arabidopsis thaliana
ttgctgcgacaagcacc

SEQ ID NO: 164852 - DNA, 17 bp, Arabidopsis thaliana
ttgctgctaagctatgg

SEQ ID NO: 164853 - DNA, 17 bp, Arabidopsis thaliana
ttgctgctggaacatgt

SEQ ID NO: 164854 - DNA, 17 bp, Arabidopsis thaliana
ttgctgcttagtggtta

SEQ ID NO: 164855 - DNA, 17 bp, Arabidopsis thaliana
ttgctggaacagaatta

SEQ ID NO: 164856 - DNA, 17 bp, Arabidopsis thaliana
ttgctggacttggtctc

SEQ ID NO: 164857 - DNA, 17 bp, Arabidopsis thaliana
ttgctggatttggcgaa

SEQ ID NO: 164858 - DNA, 17 bp, Arabidopsis thaliana
ttgctggctccctgtat

SEQ ID NO: 164859 - DNA, 17 bp, Arabidopsis thaliana
ttgctgggccacaactg

SEQ ID NO: 164860 - DNA, 17 bp, Arabidopsis thaliana
ttgctggggcggcacat

SEQ ID NO: 164861 - DNA, 17 bp, Arabidopsis thaliana
ttgctggggctgcttgc

SEQ ID NO: 164862 - DNA, 17 bp, Arabidopsis thaliana
ttgctggtaccgcctat

SEQ ID NO: 164863 - DNA, 17 bp, Arabidopsis thaliana
ttgctggttgtgattgt

SEQ ID NO: 164864 - DNA, 17 bp, Arabidopsis thaliana
ttgctgtagtcttcgcc

SEQ ID NO: 164865 - DNA, 17 bp, Arabidopsis thaliana
ttgctgtatgtgtgatg

SEQ ID NO: 164866 - DNA, 17 bp, Arabidopsis thaliana
ttgctgtcacgggtgaa

SEQ ID NO: 164867 - DNA, 17 bp, Arabidopsis thaliana
ttgctgtcgccggtttc

SEQ ID NO: 164868 - DNA, 17 bp, Arabidopsis thaliana
ttgctgtcgctggtcgc

SEQ ID NO: 164869 - DNA, 17 bp, Arabidopsis thaliana
ttgctgtcgctgtcgct

SEQ ID NO: 164870 - DNA, 17 bp, Arabidopsis thaliana
ttgctgtgacgtgtttt

SEQ ID NO: 164871 - DNA, 17 bp, Arabidopsis thaliana
ttgctgtgagtacatga

SEQ ID NO: 164872 - DNA, 17 bp, Arabidopsis thaliana
ttgctgtgattgctttc

SEQ ID NO: 164873 - DNA, 17 bp, Arabidopsis thaliana
ttgctgtgctcagggcc

SEQ ID NO: 164874 - DNA, 17 bp, Arabidopsis thaliana
ttgctgtgcttagggcc

SEQ ID NO: 164875 - DNA, 17 bp, Arabidopsis thaliana
ttgctgttattcggccc

SEQ ID NO: 164876 - DNA, 17 bp, Arabidopsis thaliana
ttgctgttgcggcccgt

SEQ ID NO: 164877 - DNA, 17 bp, Arabidopsis thaliana
ttgcttaaatcctggag

SEQ ID NO: 164878 - DNA, 17 bp, Arabidopsis thaliana
ttgcttaaccggtttga

SEQ ID NO: 164879 - DNA, 17 bp, Arabidopsis thaliana
ttgcttaatgtctgtcc

SEQ ID NO: 164880 - DNA, 17 bp, Arabidopsis thaliana
ttgcttacaatgttcca

SEQ ID NO: 164881 - DNA, 17 bp, Arabidopsis thaliana
ttgcttacagtttgttt

SEQ ID NO: 164882 - DNA, 17 bp, Arabidopsis thaliana
ttgcttaccaactgtcg

SEQ ID NO: 164883 - DNA, 17 bp, Arabidopsis thaliana
ttgcttactggcgtcag

SEQ ID NO: 164884 - DNA, 17 bp, Arabidopsis thaliana
ttgcttagtcctgtcac

SEQ ID NO: 164885 - DNA, 17 bp, Arabidopsis thaliana
ttgcttataggactccg

SEQ ID NO: 164886 - DNA, 17 bp, Arabidopsis thaliana
ttgcttataggactcct

SEQ ID NO: 164887 - DNA, 17 bp, Arabidopsis thaliana
ttgcttataggactttg

SEQ ID NO: 164888 - DNA, 17 bp, Arabidopsis thaliana
ttgcttattctcgacca

SEQ ID NO: 164889 - DNA, 17 bp, Arabidopsis thaliana
ttgcttattggactccg

SEQ ID NO: 164890 - DNA, 17 bp, Arabidopsis thaliana
ttgcttcaagccacggt

SEQ ID NO: 164891 - DNA, 17 bp, Arabidopsis thaliana
ttgcttcaaggttgctt

SEQ ID NO: 164892 - DNA, 17 bp, Arabidopsis thaliana
ttgcttcagtttctttg

SEQ ID NO: 164893 - DNA, 17 bp, Arabidopsis thaliana
ttgcttccaccagttac

SEQ ID NO: 164894 - DNA, 17 bp, Arabidopsis thaliana
ttgcttccagacagatt

SEQ ID NO: 164895 - DNA, 17 bp, Arabidopsis thaliana
ttgcttccagcttttgt

SEQ ID NO: 164896 - DNA, 17 bp, Arabidopsis thaliana
ttgcttccgacgattca

SEQ ID NO: 164897 - DNA, 17 bp, Arabidopsis thaliana
ttgcttccgactgttca

SEQ ID NO: 164898 - DNA, 17 bp, Arabidopsis thaliana
ttgcttccgtctctgag

SEQ ID NO: 164899 - DNA, 17 bp, Arabidopsis thaliana
ttgcttcctcttcatgc

SEQ ID NO: 164900 - DNA, 17 bp, Arabidopsis thaliana
ttgcttccttctctctg

SEQ ID NO: 164901 - DNA, 17 bp, Arabidopsis thaliana
ttgcttcgagacgtgtc

SEQ ID NO: 164902 - DNA, 17 bp, Arabidopsis thaliana
ttgcttcgattccgcgc

SEQ ID NO: 164903 - DNA, 17 bp, Arabidopsis thaliana
ttgcttcggagaaagag

SEQ ID NO: 164904 - DNA, 17 bp, Arabidopsis thaliana
ttgcttcggctaagatt

SEQ ID NO: 164905 - DNA, 17 bp, Arabidopsis thaliana
ttgcttcgttgtgcctg

SEQ ID NO: 164906 - DNA, 17 bp, Arabidopsis thaliana
ttgcttcgttgtgcgtg

SEQ ID NO: 164907 - DNA, 17 bp, Arabidopsis thaliana
ttgcttctttgacttcc

SEQ ID NO: 164908 - DNA, 17 bp, Arabidopsis thaliana
ttgcttgacatgagtgg

SEQ ID NO: 164909 - DNA, 17 bp, Arabidopsis thaliana
ttgcttgaccatatgga

SEQ ID NO: 164910 - DNA, 17 bp, Arabidopsis thaliana
ttgcttgaccattccaa

SEQ ID NO: 164911 - DNA, 17 bp, Arabidopsis thaliana
ttgcttgacctcctgtt

SEQ ID NO: 164912 - DNA, 17 bp, Arabidopsis thaliana
ttgcttgacggtggaag

SEQ ID NO: 164913 - DNA, 17 bp, Arabidopsis thaliana
ttgcttgactctagtcc

SEQ ID NO: 164914 - DNA, 17 bp, Arabidopsis thaliana
ttgcttgagccgtgcca

SEQ ID NO: 164915 - DNA, 17 bp, Arabidopsis thaliana
ttgcttgattacaagct

SEQ ID NO: 164916 - DNA, 17 bp, Arabidopsis thaliana
ttgcttgcctcacctag

SEQ ID NO: 164917 - DNA, 17 bp, Arabidopsis thaliana
ttgcttgccttccaagc

SEQ ID NO: 164918 - DNA, 17 bp, Arabidopsis thaliana
ttgcttgcgaaagcgga

SEQ ID NO: 164919 - DNA, 17 bp, Arabidopsis thaliana
ttgcttgcgtcgttgtg

SEQ ID NO: 164920 - DNA, 17 bp, Arabidopsis thaliana
ttgcttgcgtgactgga

SEQ ID NO: 164921 - DNA, 17 bp, Arabidopsis thaliana
ttgcttgcttataggac

SEQ ID NO: 164922 - DNA, 17 bp, Arabidopsis thaliana
ttgcttgcttcgtagat

SEQ ID NO: 164923 - DNA, 17 bp, Arabidopsis thaliana
ttgcttggagactctca

SEQ ID NO: 164924 - DNA, 17 bp, Arabidopsis thaliana
ttgcttggcatgtgata

SEQ ID NO: 164925 - DNA, 17 bp, Arabidopsis thaliana
ttgcttggccagaaatt

SEQ ID NO: 164926 - DNA, 17 bp, Arabidopsis thaliana
ttgcttggcccaatggt

SEQ ID NO: 164927 - DNA, 17 bp, Arabidopsis thaliana
ttgcttggcctcacggt

SEQ ID NO: 164928 - DNA, 17 bp, Arabidopsis thaliana
ttgcttgggtgcgagag

SEQ ID NO: 164929 - DNA, 17 bp, Arabidopsis thaliana
ttgcttgggttcgtcgt

SEQ ID NO: 164930 - DNA, 17 bp, Arabidopsis thaliana
ttgcttgggttgccaaa

SEQ ID NO: 164931 - DNA, 17 bp, Arabidopsis thaliana
ttgcttggtcggcttgt

SEQ ID NO: 164932 - DNA, 17 bp, Arabidopsis thaliana
ttgcttggtgcaggtcg

SEQ ID NO: 164933 - DNA, 17 bp, Arabidopsis thaliana
ttgcttggtgtgcattg

SEQ ID NO: 164934 - DNA, 17 bp, Arabidopsis thaliana
ttgcttgtcataacggc

SEQ ID NO: 164935 - DNA, 17 bp, Arabidopsis thaliana
ttgcttgtccaattttt

SEQ ID NO: 164936 - DNA, 17 bp, Arabidopsis thaliana
ttgcttgtccggaagct

SEQ ID NO: 164937 - DNA, 17 bp, Arabidopsis thaliana
ttgcttgtcgctggtga

SEQ ID NO: 164938 - DNA, 17 bp, Arabidopsis thaliana
ttgcttgtcgttggatt

SEQ ID NO: 164939 - DNA, 17 bp, Arabidopsis thaliana
ttgcttgtgaattcacc

SEQ ID NO: 164940 - DNA, 17 bp, Arabidopsis thaliana
ttgcttgtgggttcgtg

SEQ ID NO: 164941 - DNA, 17 bp, Arabidopsis thaliana
ttgcttgtggtaaggag

SEQ ID NO: 164942 - DNA, 17 bp, Arabidopsis thaliana
ttgcttgtgttgtcact

SEQ ID NO: 164943 - DNA, 17 bp, Arabidopsis thaliana
ttgcttgttcagactca

SEQ ID NO: 164944 - DNA, 17 bp, Arabidopsis thaliana
ttgcttgttcagactga

SEQ ID NO: 164945 - DNA, 17 bp, Arabidopsis thaliana
ttgcttgttgactacac

SEQ ID NO: 164946 - DNA, 17 bp, Arabidopsis thaliana
ttgcttgttgatcgctg

SEQ ID NO: 164947 - DNA, 17 bp, Arabidopsis thaliana
ttgcttgtttccgctct

SEQ ID NO: 164948 - DNA, 17 bp, Arabidopsis thaliana
ttgctttcaccaacagg

SEQ ID NO: 164949 - DNA, 17 bp, Arabidopsis thaliana
ttgctttcagccacatt

SEQ ID NO: 164950 - DNA, 17 bp, Arabidopsis thaliana
ttgctttcgctggagct

SEQ ID NO: 164951 - DNA, 17 bp, Arabidopsis thaliana
ttgctttcggactttcg

SEQ ID NO: 164952 - DNA, 17 bp, Arabidopsis thaliana
ttgctttctaacgcaag

SEQ ID NO: 164953 - DNA, 17 bp, Arabidopsis thaliana
ttgctttctgtgagatt

SEQ ID NO: 164954 - DNA, 17 bp, Arabidopsis thaliana
ttgctttcttggccatc

SEQ ID NO: 164955 - DNA, 17 bp, Arabidopsis thaliana
ttgctttgaggctgaac

SEQ ID NO: 164956 - DNA, 17 bp, Arabidopsis thaliana
ttgctttgcatggacgt

SEQ ID NO: 164957 - DNA, 17 bp, Arabidopsis thaliana
ttgctttgcgattcatg

SEQ ID NO: 164958 - DNA, 17 bp, Arabidopsis thaliana
ttgctttggcgcctcac

SEQ ID NO: 164959 - DNA, 17 bp, Arabidopsis thaliana
ttgcttttgcctttgcc

SEQ ID NO: 164960 - DNA, 17 bp, Arabidopsis thaliana
ttgctttttcctgacga

SEQ ID NO: 164961 - DNA, 17 bp, Arabidopsis thaliana
ttgctttttgatccttc

SEQ ID NO: 164962 - DNA, 17 bp, Arabidopsis thaliana
ttggaaacaaagcgagt

SEQ ID NO: 164963 - DNA, 17 bp, Arabidopsis thaliana
ttggaaactgaactaaa

SEQ ID NO: 164964 - DNA, 17 bp, Arabidopsis thaliana
ttggaaaggtaaccgcg

SEQ ID NO: 164965 - DNA, 17 bp, Arabidopsis thaliana
ttggaaagtctgtcagt

SEQ ID NO: 164966 - DNA, 17 bp, Arabidopsis thaliana
ttggaaataattcgtcg

SEQ ID NO: 164967 - DNA, 17 bp, Arabidopsis thaliana
ttggaaatccgcttaca

SEQ ID NO: 164968 - DNA, 17 bp, Arabidopsis thaliana
ttggaaatctcgtctat

SEQ ID NO: 164969 - DNA, 17 bp, Arabidopsis thaliana
ttggaaatgatctggtt

SEQ ID NO: 164970 - DNA, 17 bp, Arabidopsis thaliana
ttggaaattctctgttg

SEQ ID NO: 164971 - DNA, 17 bp, Arabidopsis thaliana
ttggaacacggaccaag

SEQ ID NO: 164972 - DNA, 17 bp, Arabidopsis thaliana
ttggaacacggttagga

SEQ ID NO: 164973 - DNA, 17 bp, Arabidopsis thaliana
ttggaacccggttagga

SEQ ID NO: 164974 - DNA, 17 bp, Arabidopsis thaliana
ttggaaccctgaacgaa

SEQ ID NO: 164975 - DNA, 17 bp, Arabidopsis thaliana
ttggaaccgcttgatcc

SEQ ID NO: 164976 - DNA, 17 bp, Arabidopsis thaliana
ttggaacgattgatgat

SEQ ID NO: 164977 - DNA, 17 bp, Arabidopsis thaliana
ttggaacttatttacag

SEQ ID NO: 164978 - DNA, 17 bp, Arabidopsis thaliana
ttggaagcccactgtat

SEQ ID NO: 164979 - DNA, 17 bp, Arabidopsis thaliana
ttggaagctagtgatgt

SEQ ID NO: 164980 - DNA, 17 bp, Arabidopsis thaliana
ttggaagctcgaacatc

SEQ ID NO: 164981 - DNA, 17 bp, Arabidopsis thaliana
ttggaagtgttactcaa

SEQ ID NO: 164982 - DNA, 17 bp, Arabidopsis thaliana
ttggaagtttgcgtggg

SEQ ID NO: 164983 - DNA, 17 bp, Arabidopsis thaliana
ttggaatatccgctgga

SEQ ID NO: 164984 - DNA, 17 bp, Arabidopsis thaliana
ttggaatcaacggacct

SEQ ID NO: 164985 - DNA, 17 bp, Arabidopsis thaliana
ttggaatctcaactttc

SEQ ID NO: 164986 - DNA, 17 bp, Arabidopsis thaliana
ttggaatctccgagtta

SEQ ID NO: 164987 - DNA, 17 bp, Arabidopsis thaliana
ttggaatctccgagttt

SEQ ID NO: 164988 - DNA, 17 bp, Arabidopsis thaliana
ttggaatgccttccgac

SEQ ID NO: 164989 - DNA, 17 bp, Arabidopsis thaliana
ttggaatgttcggtttc

SEQ ID NO: 164990 - DNA, 17 bp, Arabidopsis thaliana
ttggaattcctacacct

SEQ ID NO: 164991 - DNA, 17 bp, Arabidopsis thaliana
ttggaatttatttatga

SEQ ID NO: 164992 - DNA, 17 bp, Arabidopsis thaliana
ttggacaaaagatgact

SEQ ID NO: 164993 - DNA, 17 bp, Arabidopsis thaliana
ttggacaacaaatcacg

SEQ ID NO: 164994 - DNA, 17 bp, Arabidopsis thaliana
ttggacaatggttcaga

SEQ ID NO: 164995 - DNA, 17 bp, Arabidopsis thaliana
ttggacaatttaacaag

SEQ ID NO: 164996 - DNA, 17 bp, Arabidopsis thaliana
ttggacacccggattcg

SEQ ID NO: 164997 - DNA, 17 bp, Arabidopsis thaliana
ttggacatgaactttac

SEQ ID NO: 164998 - DNA, 17 bp, Arabidopsis thaliana
ttggacatgctctaagt

SEQ ID NO: 164999 - DNA, 17 bp, Arabidopsis thaliana
ttggacatgtttaggca

SEQ ID NO: 165000 - DNA, 17 bp, Arabidopsis thaliana
ttggacatttcctcgga

SEQ ID NO: 165001 - DNA, 17 bp, Arabidopsis thaliana
ttggaccaaaaaacaat

SEQ ID NO: 165002 - DNA, 17 bp, Arabidopsis thaliana
ttggaccaaagaacacc

SEQ ID NO: 165003 - DNA, 17 bp, Arabidopsis thaliana
ttggaccacgggttaat

SEQ ID NO: 165004 - DNA, 17 bp, Arabidopsis thaliana
ttggaccacttgtgttt

SEQ ID NO: 165005 - DNA, 17 bp, Arabidopsis thaliana
ttggaccagcagttcga

SEQ ID NO: 165006 - DNA, 17 bp, Arabidopsis thaliana
ttggaccaggcttcatt

SEQ ID NO: 165007 - DNA, 17 bp, Arabidopsis thaliana
ttggaccataggtgcga

SEQ ID NO: 165008 - DNA, 17 bp, Arabidopsis thaliana
ttggacccacgataaca

SEQ ID NO: 165009 - DNA, 17 bp, Arabidopsis thaliana
ttggacccacggcaaat

SEQ ID NO: 165010 - DNA, 17 bp, Arabidopsis thaliana
ttggacccagaagatta

SEQ ID NO: 165011 - DNA, 17 bp, Arabidopsis thaliana
ttggacccttcttttgt

SEQ ID NO: 165012 - DNA, 17 bp, Arabidopsis thaliana
ttggacccttgatccga

SEQ ID NO: 165013 - DNA, 17 bp, Arabidopsis thaliana
ttggaccgcgtcccgcg

SEQ ID NO: 165014 - DNA, 17 bp, Arabidopsis thaliana
ttggaccgcttgaaatc

SEQ ID NO: 165015 - DNA, 17 bp, Arabidopsis thaliana
ttggaccgcttgaaatt

SEQ ID NO: 165016 - DNA, 17 bp, Arabidopsis thaliana
ttggaccgtaaccagac

SEQ ID NO: 165017 - DNA, 17 bp, Arabidopsis thaliana
ttggaccgttttgtccg

SEQ ID NO: 165018 - DNA, 17 bp, Arabidopsis thaliana
ttggacctgcctatgcg

SEQ ID NO: 165019 - DNA, 17 bp, Arabidopsis thaliana
ttggacgattttaccct

SEQ ID NO: 165020 - DNA, 17 bp, Arabidopsis thaliana
ttggacggaccatttga

SEQ ID NO: 165021 - DNA, 17 bp, Arabidopsis thaliana
ttggacgtgccggagtg

SEQ ID NO: 165022 - DNA, 17 bp, Arabidopsis thaliana
ttggactaagggagctc

SEQ ID NO: 165023 - DNA, 17 bp, Arabidopsis thaliana
ttggactaccagactgt

SEQ ID NO: 165024 - DNA, 17 bp, Arabidopsis thaliana
ttggactacctgaatgt

SEQ ID NO: 165025 - DNA, 17 bp, Arabidopsis thaliana
ttggactcaagggagct

SEQ ID NO: 165026 - DNA, 17 bp, Arabidopsis thaliana
ttggactccgatcaagt

SEQ ID NO: 165027 - DNA, 17 bp, Arabidopsis thaliana
ttggactctcgacaacg

SEQ ID NO: 165028 - DNA, 17 bp, Arabidopsis thaliana
ttggactgaaacccgta

SEQ ID NO: 165029 - DNA, 17 bp, Arabidopsis thaliana
ttggactgaaacgttca

SEQ ID NO: 165030 - DNA, 17 bp, Arabidopsis thaliana
ttggactgaagggagca

SEQ ID NO: 165031 - DNA, 17 bp, Arabidopsis thaliana
ttggactgaagggagct

SEQ ID NO: 165032 - DNA, 17 bp, Arabidopsis thaliana
ttggactgaagggaggt

SEQ ID NO: 165033 - DNA, 17 bp, Arabidopsis thaliana
ttggactgaaggtagct

SEQ ID NO: 165034 - DNA, 17 bp, Arabidopsis thaliana
ttggactgaagtgagct

SEQ ID NO: 165035 - DNA, 17 bp, Arabidopsis thaliana
ttggactgaatggagct

SEQ ID NO: 165036 - DNA, 17 bp, Arabidopsis thaliana
ttggactgcagggagct

SEQ ID NO: 165037 - DNA, 17 bp, Arabidopsis thaliana
ttggactggcttgagca

SEQ ID NO: 165038 - DNA, 17 bp, Arabidopsis thaliana
ttggactgggcaaaggc

SEQ ID NO: 165039 - DNA, 17 bp, Arabidopsis thaliana
ttggactgggcaagccc

SEQ ID NO: 165040 - DNA, 17 bp, Arabidopsis thaliana
ttggactggggttttgt

SEQ ID NO: 165041 - DNA, 17 bp, Arabidopsis thaliana
ttggactgtttttcgtt

SEQ ID NO: 165042 - DNA, 17 bp, Arabidopsis thaliana
ttggacttgagaagtat

SEQ ID NO: 165043 - DNA, 17 bp, Arabidopsis thaliana
ttggacttgcgttttcc

SEQ ID NO: 165044 - DNA, 17 bp, Arabidopsis thaliana
ttggagaactataccgc

SEQ ID NO: 165045 - DNA, 17 bp, Arabidopsis thaliana
ttggagaagacggttca

SEQ ID NO: 165046 - DNA, 17 bp, Arabidopsis thaliana
ttggagaattacgggtt

SEQ ID NO: 165047 - DNA, 17 bp, Arabidopsis thaliana
ttggagaattcgcaggg

SEQ ID NO: 165048 - DNA, 17 bp, Arabidopsis thaliana
ttggagaccctcagact

SEQ ID NO: 165049 - DNA, 17 bp, Arabidopsis thaliana
ttggagacggtccaatt

SEQ ID NO: 165050 - DNA, 17 bp, Arabidopsis thaliana
ttggagactctcagact

SEQ ID NO: 165051 - DNA, 17 bp, Arabidopsis thaliana
ttggagagagaccctca

SEQ ID NO: 165052 - DNA, 17 bp, Arabidopsis thaliana
ttggagagagttggcca

SEQ ID NO: 165053 - DNA, 17 bp, Arabidopsis thaliana
ttggagagattacggac

SEQ ID NO: 165054 - DNA, 17 bp, Arabidopsis thaliana
ttggagagctttccagg

SEQ ID NO: 165055 - DNA, 17 bp, Arabidopsis thaliana
ttggagatctactacac

SEQ ID NO: 165056 - DNA, 17 bp, Arabidopsis thaliana
ttggagatctactgcac

SEQ ID NO: 165057 - DNA, 17 bp, Arabidopsis thaliana
ttggagatggtcttagc

SEQ ID NO: 165058 - DNA, 17 bp, Arabidopsis thaliana
ttggagcatagcacaag

SEQ ID NO: 165059 - DNA, 17 bp, Arabidopsis thaliana
ttggagccacagattcg

SEQ ID NO: 165060 - DNA, 17 bp, Arabidopsis thaliana
ttggagccgttgtcaat

SEQ ID NO: 165061 - DNA, 17 bp, Arabidopsis thaliana
ttggaggcccgctatct

SEQ ID NO: 165062 - DNA, 17 bp, Arabidopsis thaliana
ttggagggattacgggc

SEQ ID NO: 165063 - DNA, 17 bp, Arabidopsis thaliana
ttggagggcaagtctgg

SEQ ID NO: 165064 - DNA, 17 bp, Arabidopsis thaliana
ttggagggctgggctcg

SEQ ID NO: 165065 - DNA, 17 bp, Arabidopsis thaliana
ttggagtccaatatgac

SEQ ID NO: 165066 - DNA, 17 bp, Arabidopsis thaliana
ttggagtcttcatacgg

SEQ ID NO: 165067 - DNA, 17 bp, Arabidopsis thaliana
ttggagtgaatatgcct

SEQ ID NO: 165068 - DNA, 17 bp, Arabidopsis thaliana
ttggagtgcaacaccat

SEQ ID NO: 165069 - DNA, 17 bp, Arabidopsis thaliana
ttggagttctcttgtcg

SEQ ID NO: 165070 - DNA, 17 bp, Arabidopsis thaliana
ttggagttggacttggc

SEQ ID NO: 165071 - DNA, 17 bp, Arabidopsis thaliana
ttggataaaaagtttca

SEQ ID NO: 165072 - DNA, 17 bp, Arabidopsis thaliana
ttggataaaagtttcag

SEQ ID NO: 165073 - DNA, 17 bp, Arabidopsis thaliana
ttggataggtttgctcc

SEQ ID NO: 165074 - DNA, 17 bp, Arabidopsis thaliana
ttggatagtgaagtgta

SEQ ID NO: 165075 - DNA, 17 bp, Arabidopsis thaliana
ttggatataatcgctgc

SEQ ID NO: 165076 - DNA, 17 bp, Arabidopsis thaliana
ttggatcaggttaggtt

SEQ ID NO: 165077 - DNA, 17 bp, Arabidopsis thaliana
ttggatcaggttcggtt

SEQ ID NO: 165078 - DNA, 17 bp, Arabidopsis thaliana
ttggatcccgccttgca

SEQ ID NO: 165079 - DNA, 17 bp, Arabidopsis thaliana
ttggatccgcgcgtgcc

SEQ ID NO: 165080 - DNA, 17 bp, Arabidopsis thaliana
ttggatccgctgtgcgg

SEQ ID NO: 165081 - DNA, 17 bp, Arabidopsis thaliana
ttggatccgctgtgctg

SEQ ID NO: 165082 - DNA, 17 bp, Arabidopsis thaliana
ttggatcgtaaccagac

SEQ ID NO: 165083 - DNA, 17 bp, Arabidopsis thaliana
ttggatcgtccaataag

SEQ ID NO: 165084 - DNA, 17 bp, Arabidopsis thaliana
ttggatcgttgcgatta

SEQ ID NO: 165085 - DNA, 17 bp, Arabidopsis thaliana
ttggatctttcggactt

SEQ ID NO: 165086 - DNA, 17 bp, Arabidopsis thaliana
ttggatcttttgatgaa

SEQ ID NO: 165087 - DNA, 17 bp, Arabidopsis thaliana
ttggatgacaacttttc

SEQ ID NO: 165088 - DNA, 17 bp, Arabidopsis thaliana
ttggatgagcctcagga

SEQ ID NO: 165089 - DNA, 17 bp, Arabidopsis thaliana
ttggatgatcgggcgga

SEQ ID NO: 165090 - DNA, 17 bp, Arabidopsis thaliana
ttggatgatgagctgcc

SEQ ID NO: 165091 - DNA, 17 bp, Arabidopsis thaliana
ttggatgatgtgaggat

SEQ ID NO: 165092 - DNA, 17 bp, Arabidopsis thaliana
ttggatgccgggcggtt

SEQ ID NO: 165093 - DNA, 17 bp, Arabidopsis thaliana
ttggatgctgctcagct

SEQ ID NO: 165094 - DNA, 17 bp, Arabidopsis thaliana
ttggatggcccagcccc

SEQ ID NO: 165095 - DNA, 17 bp, Arabidopsis thaliana
ttggatggggtcgccag

SEQ ID NO: 165096 - DNA, 17 bp, Arabidopsis thaliana
ttggatgttccatgtga

SEQ ID NO: 165097 - DNA, 17 bp, Arabidopsis thaliana
ttggattactgtgccaa

SEQ ID NO: 165098 - DNA, 17 bp, Arabidopsis thaliana
ttggattcagggaatcg

SEQ ID NO: 165099 - DNA, 17 bp, Arabidopsis thaliana
ttggattccgccattta

SEQ ID NO: 165100 - DNA, 17 bp, Arabidopsis thaliana
ttggattctgacacatt

SEQ ID NO: 165101 - DNA, 17 bp, Arabidopsis thaliana
ttggattcttctttggc

SEQ ID NO: 165102 - DNA, 17 bp, Arabidopsis thaliana
ttggattgaagggagcc

SEQ ID NO: 165103 - DNA, 17 bp, Arabidopsis thaliana
ttggattgaagggagct

SEQ ID NO: 165104 - DNA, 17 bp, Arabidopsis thaliana
ttggattgagacacacg

SEQ ID NO: 165105 - DNA, 17 bp, Arabidopsis thaliana
ttggattgagtatgtgc

SEQ ID NO: 165106 - DNA, 17 bp, Arabidopsis thaliana
ttggattgattccccca

SEQ ID NO: 165107 - DNA, 17 bp, Arabidopsis thaliana
ttggattgccaaggttt

SEQ ID NO: 165108 - DNA, 17 bp, Arabidopsis thaliana
ttggattgtgacacagt

SEQ ID NO: 165109 - DNA, 17 bp, Arabidopsis thaliana
ttggatttaagggagct

SEQ ID NO: 165110 - DNA, 17 bp, Arabidopsis thaliana
ttggatttcagcgagcg

SEQ ID NO: 165111 - DNA, 17 bp, Arabidopsis thaliana
ttggatttctgattgcg

SEQ ID NO: 165112 - DNA, 17 bp, Arabidopsis thaliana
ttggatttgatttggtt

SEQ ID NO: 165113 - DNA, 17 bp, Arabidopsis thaliana
ttggatttgccatttta

SEQ ID NO: 165114 - DNA, 17 bp, Arabidopsis thaliana
ttggatttgggcctgca

SEQ ID NO: 165115 - DNA, 17 bp, Arabidopsis thaliana
ttggattttgattcgct

SEQ ID NO: 165116 - DNA, 17 bp, Arabidopsis thaliana
ttggcaaccgagtccaa

SEQ ID NO: 165117 - DNA, 17 bp, Arabidopsis thaliana
ttggcaacgaagatagg

SEQ ID NO: 165118 - DNA, 17 bp, Arabidopsis thaliana
ttggcaagaatatccgc

SEQ ID NO: 165119 - DNA, 17 bp, Arabidopsis thaliana
ttggcaagacggatttg

SEQ ID NO: 165120 - DNA, 17 bp, Arabidopsis thaliana
ttggcaagacgggtttg

SEQ ID NO: 165121 - DNA, 17 bp, Arabidopsis thaliana
ttggcaagtgtgccacg

SEQ ID NO: 165122 - DNA, 17 bp, Arabidopsis thaliana
ttggcaataggtggaaa

SEQ ID NO: 165123 - DNA, 17 bp, Arabidopsis thaliana
ttggcaattcacagtct

SEQ ID NO: 165124 - DNA, 17 bp, Arabidopsis thaliana
ttggcacaacttggaac

SEQ ID NO: 165125 - DNA, 17 bp, Arabidopsis thaliana
ttggcaccaacagacac

SEQ ID NO: 165126 - DNA, 17 bp, Arabidopsis thaliana
ttggcacccgagataaa

SEQ ID NO: 165127 - DNA, 17 bp, Arabidopsis thaliana
ttggcaccgtttggaca

SEQ ID NO: 165128 - DNA, 17 bp, Arabidopsis thaliana
ttggcacctcgatgtcg

SEQ ID NO: 165129 - DNA, 17 bp, Arabidopsis thaliana
ttggcacctttgtgtct

SEQ ID NO: 165130 - DNA, 17 bp, Arabidopsis thaliana
ttggcacgtctgcctgg

SEQ ID NO: 165131 - DNA, 17 bp, Arabidopsis thaliana
ttggcactgacatgcgg

SEQ ID NO: 165132 - DNA, 17 bp, Arabidopsis thaliana
ttggcagacatttttct

SEQ ID NO: 165133 - DNA, 17 bp, Arabidopsis thaliana
ttggcagaccatggaat

SEQ ID NO: 165134 - DNA, 17 bp, Arabidopsis thaliana
ttggcagagcaactgag

SEQ ID NO: 165135 - DNA, 17 bp, Arabidopsis thaliana
ttggcagattccatact

SEQ ID NO: 165136 - DNA, 17 bp, Arabidopsis thaliana
ttggcagctgctgtgac

SEQ ID NO: 165137 - DNA, 17 bp, Arabidopsis thaliana
ttggcaggacgggtttg

SEQ ID NO: 165138 - DNA, 17 bp, Arabidopsis thaliana
ttggcataatggcggat

SEQ ID NO: 165139 - DNA, 17 bp, Arabidopsis thaliana
ttggcataccacggtgg

SEQ ID NO: 165140 - DNA, 17 bp, Arabidopsis thaliana
ttggcatattagactgt

SEQ ID NO: 165141 - DNA, 17 bp, Arabidopsis thaliana
ttggcatgcggagtaga

SEQ ID NO: 165142 - DNA, 17 bp, Arabidopsis thaliana
ttggcatgtgatacctt

SEQ ID NO: 165143 - DNA, 17 bp, Arabidopsis thaliana
ttggcatgtgtggctat

SEQ ID NO: 165144 - DNA, 17 bp, Arabidopsis thaliana
ttggcatgttactgtag

SEQ ID NO: 165145 - DNA, 17 bp, Arabidopsis thaliana
ttggcattagtcggaaa

SEQ ID NO: 165146 - DNA, 17 bp, Arabidopsis thaliana
ttggcattctgcacctc

SEQ ID NO: 165147 - DNA, 17 bp, Arabidopsis thaliana
ttggcattctgtcagcc

SEQ ID NO: 165148 - DNA, 17 bp, Arabidopsis thaliana
ttggcattctgtccacc

SEQ ID NO: 165149 - DNA, 17 bp, Arabidopsis thaliana
ttggcattctttccgcc

SEQ ID NO: 165150 - DNA, 17 bp, Arabidopsis thaliana
ttggcattttcgtgatt

SEQ ID NO: 165151 - DNA, 17 bp, Arabidopsis thaliana
ttggccaactatctgca

SEQ ID NO: 165152 - DNA, 17 bp, Arabidopsis thaliana
ttggccaactctctcca

SEQ ID NO: 165153 - DNA, 17 bp, Arabidopsis thaliana
ttggccaactcttccat

SEQ ID NO: 165154 - DNA, 17 bp, Arabidopsis thaliana
ttggccaacttctccat

SEQ ID NO: 165155 - DNA, 17 bp, Arabidopsis thaliana
ttggccaactttctcca

SEQ ID NO: 165156 - DNA, 17 bp, Arabidopsis thaliana
ttggccaaggatgactt

SEQ ID NO: 165157 - DNA, 17 bp, Arabidopsis thaliana
ttggccaatgttttcca

SEQ ID NO: 165158 - DNA, 17 bp, Arabidopsis thaliana
ttggccaattatcgcaa

SEQ ID NO: 165159 - DNA, 17 bp, Arabidopsis thaliana
ttggccaattccatcaa

SEQ ID NO: 165160 - DNA, 17 bp, Arabidopsis thaliana
ttggccaattctctcca

SEQ ID NO: 165161 - DNA, 17 bp, Arabidopsis thaliana
ttggccacagcttgcgg

SEQ ID NO: 165162 - DNA, 17 bp, Arabidopsis thaliana
ttggccacagttcacct

SEQ ID NO: 165163 - DNA, 17 bp, Arabidopsis thaliana
ttggccagaaatttgtg

SEQ ID NO: 165164 - DNA, 17 bp, Arabidopsis thaliana
ttggccagcttttgtct

SEQ ID NO: 165165 - DNA, 17 bp, Arabidopsis thaliana
ttggcccaatatgaacc

SEQ ID NO: 165166 - DNA, 17 bp, Arabidopsis thaliana
ttggcccaatggttgac

SEQ ID NO: 165167 - DNA, 17 bp, Arabidopsis thaliana
ttggcccaatggttgat

SEQ ID NO: 165168 - DNA, 17 bp, Arabidopsis thaliana
ttggcccaggaaaaatc

SEQ ID NO: 165169 - DNA, 17 bp, Arabidopsis thaliana
ttggcccagtaaaaatc

SEQ ID NO: 165170 - DNA, 17 bp, Arabidopsis thaliana
ttggcccatgaatttga

SEQ ID NO: 165171 - DNA, 17 bp, Arabidopsis thaliana
ttggcccatgtcgttat

SEQ ID NO: 165172 - DNA, 17 bp, Arabidopsis thaliana
ttggccccaccttccct

SEQ ID NO: 165173 - DNA, 17 bp, Arabidopsis thaliana
ttggcccccaaaaggga

SEQ ID NO: 165174 - DNA, 17 bp, Arabidopsis thaliana
ttggcccccaattttag

SEQ ID NO: 165175 - DNA, 17 bp, Arabidopsis thaliana
ttggccccgggcttact

SEQ ID NO: 165176 - DNA, 17 bp, Arabidopsis thaliana
ttggcccgacagtaaat

SEQ ID NO: 165177 - DNA, 17 bp, Arabidopsis thaliana
ttggcccgcttgtgctc

SEQ ID NO: 165178 - DNA, 17 bp, Arabidopsis thaliana
ttggccctgttcgtttc

SEQ ID NO: 165179 - DNA, 17 bp, Arabidopsis thaliana
ttggccgaaatcacaaa

SEQ ID NO: 165180 - DNA, 17 bp, Arabidopsis thaliana
ttggccgaaatcagtta

SEQ ID NO: 165181 - DNA, 17 bp, Arabidopsis thaliana
ttggccgaactcttttg

SEQ ID NO: 165182 - DNA, 17 bp, Arabidopsis thaliana
ttggccgaactgacaga

SEQ ID NO: 165183 - DNA, 17 bp, Arabidopsis thaliana
ttggccgaatcttgtaa

SEQ ID NO: 165184 - DNA, 17 bp, Arabidopsis thaliana
ttggccgacaggcccgg

SEQ ID NO: 165185 - DNA, 17 bp, Arabidopsis thaliana
ttggccgaccgagatct

SEQ ID NO: 165186 - DNA, 17 bp, Arabidopsis thaliana
ttggccgactttttcag

SEQ ID NO: 165187 - DNA, 17 bp, Arabidopsis thaliana
ttggccgagggcacgtc

SEQ ID NO: 165188 - DNA, 17 bp, Arabidopsis thaliana
ttggccgagtccctctc

SEQ ID NO: 165189 - DNA, 17 bp, Arabidopsis thaliana
ttggccgagtggtctaa

SEQ ID NO: 165190 - DNA, 17 bp, Arabidopsis thaliana
ttggccggaaaatgatg

SEQ ID NO: 165191 - DNA, 17 bp, Arabidopsis thaliana
ttggccggaatcacaaa

SEQ ID NO: 165192 - DNA, 17 bp, Arabidopsis thaliana
ttggccggagttgtgga

SEQ ID NO: 165193 - DNA, 17 bp, Arabidopsis thaliana
ttggccgggtcaacgat

SEQ ID NO: 165194 - DNA, 17 bp, Arabidopsis thaliana
ttggccgggtcgtgcct

SEQ ID NO: 165195 - DNA, 17 bp, Arabidopsis thaliana
ttggccggtagtaggta

SEQ ID NO: 165196 - DNA, 17 bp, Arabidopsis thaliana
ttggccggtagtaggtt

SEQ ID NO: 165197 - DNA, 17 bp, Arabidopsis thaliana
ttggcctacaatcttct

SEQ ID NO: 165198 - DNA, 17 bp, Arabidopsis thaliana
ttggcctacatcagctg

SEQ ID NO: 165199 - DNA, 17 bp, Arabidopsis thaliana
ttggcctagtggtaaat

SEQ ID NO: 165200 - DNA, 17 bp, Arabidopsis thaliana
ttggcctatttgaccaa

SEQ ID NO: 165201 - DNA, 17 bp, Arabidopsis thaliana
ttggcctcacggtatag

SEQ ID NO: 165202 - DNA, 17 bp, Arabidopsis thaliana
ttggcctcacggtctaa

SEQ ID NO: 165203 - DNA, 17 bp, Arabidopsis thaliana
ttggcctctattttcgc

SEQ ID NO: 165204 - DNA, 17 bp, Arabidopsis thaliana
ttggcctgaactaggac

SEQ ID NO: 165205 - DNA, 17 bp, Arabidopsis thaliana
ttggcctggtcaacaca

SEQ ID NO: 165206 - DNA, 17 bp, Arabidopsis thaliana
ttggcctggtcaacgat

SEQ ID NO: 165207 - DNA, 17 bp, Arabidopsis thaliana
ttggccttctaagcccg

SEQ ID NO: 165208 - DNA, 17 bp, Arabidopsis thaliana
ttggcgaaatggccatg

SEQ ID NO: 165209 - DNA, 17 bp, Arabidopsis thaliana
ttggcgaagtctgaatc

SEQ ID NO: 165210 - DNA, 17 bp, Arabidopsis thaliana
ttggcgacacgtgtata

SEQ ID NO: 165211 - DNA, 17 bp, Arabidopsis thaliana
ttggcgacattcgtagg

SEQ ID NO: 165212 - DNA, 17 bp, Arabidopsis thaliana
ttggcgaccgagaagga

SEQ ID NO: 165213 - DNA, 17 bp, Arabidopsis thaliana
ttggcgacgggtgtcac

SEQ ID NO: 165214 - DNA, 17 bp, Arabidopsis thaliana
ttggcgactttcaccgc

SEQ ID NO: 165215 - DNA, 17 bp, Arabidopsis thaliana
ttggcgagaaaatcaca

SEQ ID NO: 165216 - DNA, 17 bp, Arabidopsis thaliana
ttggcgagctcgtagac

SEQ ID NO: 165217 - DNA, 17 bp, Arabidopsis thaliana
ttggcggaaaaattacg

SEQ ID NO: 165218 - DNA, 17 bp, Arabidopsis thaliana
ttggcggaaagattggt

SEQ ID NO: 165219 - DNA, 17 bp, Arabidopsis thaliana
ttggcggaaatttttgt

SEQ ID NO: 165220 - DNA, 17 bp, Arabidopsis thaliana
ttggcggaacgggcttg

SEQ ID NO: 165221 - DNA, 17 bp, Arabidopsis thaliana
ttggcggaacgggtttg

SEQ ID NO: 165222 - DNA, 17 bp, Arabidopsis thaliana
ttggcggacgggtttgg

SEQ ID NO: 165223 - DNA, 17 bp, Arabidopsis thaliana
ttggcggatcagtccac

SEQ ID NO: 165224 - DNA, 17 bp, Arabidopsis thaliana
ttggcggattccatact

SEQ ID NO: 165225 - DNA, 17 bp, Arabidopsis thaliana
ttggcggcctaagcccg

SEQ ID NO: 165226 - DNA, 17 bp, Arabidopsis thaliana
ttggcggcctaagccct

SEQ ID NO: 165227 - DNA, 17 bp, Arabidopsis thaliana
ttggcggcgatcctcca

SEQ ID NO: 165228 - DNA, 17 bp, Arabidopsis thaliana
ttggcgggaaaatcaca

SEQ ID NO: 165229 - DNA, 17 bp, Arabidopsis thaliana
ttggcgggaaaatctca

SEQ ID NO: 165230 - DNA, 17 bp, Arabidopsis thaliana
ttggcgggaaaattacg

SEQ ID NO: 165231 - DNA, 17 bp, Arabidopsis thaliana
ttggcgggaaaattttg

SEQ ID NO: 165232 - DNA, 17 bp, Arabidopsis thaliana
ttggcgggacaggtttg

SEQ ID NO: 165233 - DNA, 17 bp, Arabidopsis thaliana
ttggcgggacgagttta

SEQ ID NO: 165234 - DNA, 17 bp, Arabidopsis thaliana
ttggcgggacgggttgg

SEQ ID NO: 165235 - DNA, 17 bp, Arabidopsis thaliana
ttggcgggacgggtttg

SEQ ID NO: 165236 - DNA, 17 bp, Arabidopsis thaliana
ttggcgggatccctcgc

SEQ ID NO: 165237 - DNA, 17 bp, Arabidopsis thaliana
ttggcgggatccctggc

SEQ ID NO: 165238 - DNA, 17 bp, Arabidopsis thaliana
ttggcgggattcctcgc

SEQ ID NO: 165239 - DNA, 17 bp, Arabidopsis thaliana
ttggcggttgcactgta

SEQ ID NO: 165240 - DNA, 17 bp, Arabidopsis thaliana
ttggcgtcacagctgtc

SEQ ID NO: 165241 - DNA, 17 bp, Arabidopsis thaliana
ttggcgtcgctcagaac

SEQ ID NO: 165242 - DNA, 17 bp, Arabidopsis thaliana
ttggcgtcgtcgatgtt

SEQ ID NO: 165243 - DNA, 17 bp, Arabidopsis thaliana
ttggcgtttcttggcct

SEQ ID NO: 165244 - DNA, 17 bp, Arabidopsis thaliana
ttggctaactaggatat

SEQ ID NO: 165245 - DNA, 17 bp, Arabidopsis thaliana
ttggctaagtccgttcg

SEQ ID NO: 165246 - DNA, 17 bp, Arabidopsis thaliana
ttggctacaccatgaaa

SEQ ID NO: 165247 - DNA, 17 bp, Arabidopsis thaliana
ttggctacagctgtaac

SEQ ID NO: 165248 - DNA, 17 bp, Arabidopsis thaliana
ttggctacgactgtggg

SEQ ID NO: 165249 - DNA, 17 bp, Arabidopsis thaliana
ttggctacttcaggttc

SEQ ID NO: 165250 - DNA, 17 bp, Arabidopsis thaliana
ttggctagactctgaac

SEQ ID NO: 165251 - DNA, 17 bp, Arabidopsis thaliana
ttggctagcagatctgc

SEQ ID NO: 165252 - DNA, 17 bp, Arabidopsis thaliana
ttggctaggctcaaccg

SEQ ID NO: 165253 - DNA, 17 bp, Arabidopsis thaliana
ttggctattacagtggg

SEQ ID NO: 165254 - DNA, 17 bp, Arabidopsis thaliana
ttggctattggccgacc

SEQ ID NO: 165255 - DNA, 17 bp, Arabidopsis thaliana
ttggctcaaattcacct

SEQ ID NO: 165256 - DNA, 17 bp, Arabidopsis thaliana
ttggctcaagacttggt

SEQ ID NO: 165257 - DNA, 17 bp, Arabidopsis thaliana
ttggctcaagagatagt

SEQ ID NO: 165258 - DNA, 17 bp, Arabidopsis thaliana
ttggctcaccgacacca

SEQ ID NO: 165259 - DNA, 17 bp, Arabidopsis thaliana
ttggctcaggtctggta

SEQ ID NO: 165260 - DNA, 17 bp, Arabidopsis thaliana
ttggctcatgggcttct

SEQ ID NO: 165261 - DNA, 17 bp, Arabidopsis thaliana
ttggctcatgggctttt

SEQ ID NO: 165262 - DNA, 17 bp, Arabidopsis thaliana
ttggctcgattcactat

SEQ ID NO: 165263 - DNA, 17 bp, Arabidopsis thaliana
ttggctcgctcggccga

SEQ ID NO: 165264 - DNA, 17 bp, Arabidopsis thaliana
ttggctcgctcggtcga

SEQ ID NO: 165265 - DNA, 17 bp, Arabidopsis thaliana
ttggctcggattcgtcc

SEQ ID NO: 165266 - DNA, 17 bp, Arabidopsis thaliana
ttggctcgggcgcgtca

SEQ ID NO: 165267 - DNA, 17 bp, Arabidopsis thaliana
ttggctctgagggctgg

SEQ ID NO: 165268 - DNA, 17 bp, Arabidopsis thaliana
ttggctctgagggtggg

SEQ ID NO: 165269 - DNA, 17 bp, Arabidopsis thaliana
ttggctgaaggtgtgat

SEQ ID NO: 165270 - DNA, 17 bp, Arabidopsis thaliana
ttggctgagtgataggg

SEQ ID NO: 165271 - DNA, 17 bp, Arabidopsis thaliana
ttggctgatcagacaac

SEQ ID NO: 165272 - DNA, 17 bp, Arabidopsis thaliana
ttggctgccttcacacc

SEQ ID NO: 165273 - DNA, 17 bp, Arabidopsis thaliana
ttggctgcttacacttg

SEQ ID NO: 165274 - DNA, 17 bp, Arabidopsis thaliana
ttggctggaaaatgatg

SEQ ID NO: 165275 - DNA, 17 bp, Arabidopsis thaliana
ttggctggcttatcttt

SEQ ID NO: 165276 - DNA, 17 bp, Arabidopsis thaliana
ttggctggggcagcaca

SEQ ID NO: 165277 - DNA, 17 bp, Arabidopsis thaliana
ttggctggggcggcaca

SEQ ID NO: 165278 - DNA, 17 bp, Arabidopsis thaliana
ttggctggggcggcgca

SEQ ID NO: 165279 - DNA, 17 bp, Arabidopsis thaliana
ttggcttaagccggaag

SEQ ID NO: 165280 - DNA, 17 bp, Arabidopsis thaliana
ttggcttacctatggcc

SEQ ID NO: 165281 - DNA, 17 bp, Arabidopsis thaliana
ttggcttcggggatggt

SEQ ID NO: 165282 - DNA, 17 bp, Arabidopsis thaliana
ttggcttcgtcgctgac

SEQ ID NO: 165283 - DNA, 17 bp, Arabidopsis thaliana
ttggcttctaccgcaag

SEQ ID NO: 165284 - DNA, 17 bp, Arabidopsis thaliana
ttggcttctaccgtaac

SEQ ID NO: 165285 - DNA, 17 bp, Arabidopsis thaliana
ttggcttctagcgcaag

SEQ ID NO: 165286 - DNA, 17 bp, Arabidopsis thaliana
ttggcttgacttagtga

SEQ ID NO: 165287 - DNA, 17 bp, Arabidopsis thaliana
ttggcttgcgagaggta

SEQ ID NO: 165288 - DNA, 17 bp, Arabidopsis thaliana
ttggcttggtttatgta

SEQ ID NO: 165289 - DNA, 17 bp, Arabidopsis thaliana
ttggcttggttttgaca

SEQ ID NO: 165290 - DNA, 17 bp, Arabidopsis thaliana
ttggctttgaatggaac

SEQ ID NO: 165291 - DNA, 17 bp, Arabidopsis thaliana
ttggctttggcactcaa

SEQ ID NO: 165292 - DNA, 17 bp, Arabidopsis thaliana
ttggctttggccgagtg

SEQ ID NO: 165293 - DNA, 17 bp, Arabidopsis thaliana
ttggctttgggcttttc

SEQ ID NO: 165294 - DNA, 17 bp, Arabidopsis thaliana
ttggctttgtattgcaa

SEQ ID NO: 165295 - DNA, 17 bp, Arabidopsis thaliana
ttggcttttaccgcaag

SEQ ID NO: 165296 - DNA, 17 bp, Arabidopsis thaliana
ttggcttttggcttttg

SEQ ID NO: 165297 - DNA, 17 bp, Arabidopsis thaliana
ttggctttttattggct

SEQ ID NO: 165298 - DNA, 17 bp, Arabidopsis thaliana
ttgggaaacttgccact

SEQ ID NO: 165299 - DNA, 17 bp, Arabidopsis thaliana
ttgggaaatcgaggcag

SEQ ID NO: 165300 - DNA, 17 bp, Arabidopsis thaliana
ttgggaacgatatggcg

SEQ ID NO: 165301 - DNA, 17 bp, Arabidopsis thaliana
ttgggaacggctctctc

SEQ ID NO: 165302 - DNA, 17 bp, Arabidopsis thaliana
ttgggaagcattgtgtg

SEQ ID NO: 165303 - DNA, 17 bp, Arabidopsis thaliana
ttgggaagctgaaccag

SEQ ID NO: 165304 - DNA, 17 bp, Arabidopsis thaliana
ttgggaagtctggcagt

SEQ ID NO: 165305 - DNA, 17 bp, Arabidopsis thaliana
ttgggaagtcttggatc

SEQ ID NO: 165306 - DNA, 17 bp, Arabidopsis thaliana
ttgggaagttgagtagg

SEQ ID NO: 165307 - DNA, 17 bp, Arabidopsis thaliana
ttgggaatagttattga

SEQ ID NO: 165308 - DNA, 17 bp, Arabidopsis thaliana
ttgggaatttgtctgtt

SEQ ID NO: 165309 - DNA, 17 bp, Arabidopsis thaliana
ttgggacctccatccaa

SEQ ID NO: 165310 - DNA, 17 bp, Arabidopsis thaliana
ttgggacgggttggcgg

SEQ ID NO: 165311 - DNA, 17 bp, Arabidopsis thaliana
ttgggacttattcacaa

SEQ ID NO: 165312 - DNA, 17 bp, Arabidopsis thaliana
ttgggacttattcacac

SEQ ID NO: 165313 - DNA, 17 bp, Arabidopsis thaliana
ttgggacttattcacag

SEQ ID NO: 165314 - DNA, 17 bp, Arabidopsis thaliana
ttgggacttattcacat

SEQ ID NO: 165315 - DNA, 17 bp, Arabidopsis thaliana
ttgggacttatttacat

SEQ ID NO: 165316 - DNA, 17 bp, Arabidopsis thaliana
ttgggacttatttacga

SEQ ID NO: 165317 - DNA, 17 bp, Arabidopsis thaliana
ttgggacttatttactt

SEQ ID NO: 165318 - DNA, 17 bp, Arabidopsis thaliana
ttgggagaagtgactac

SEQ ID NO: 165319 - DNA, 17 bp, Arabidopsis thaliana
ttgggagacatccagct

SEQ ID NO: 165320 - DNA, 17 bp, Arabidopsis thaliana
ttgggagatttatcact

SEQ ID NO: 165321 - DNA, 17 bp, Arabidopsis thaliana
ttgggagcctatctcgc

SEQ ID NO: 165322 - DNA, 17 bp, Arabidopsis thaliana
ttgggaggattacggac

SEQ ID NO: 165323 - DNA, 17 bp, Arabidopsis thaliana
ttgggagttggagagtt

SEQ ID NO: 165324 - DNA, 17 bp, Arabidopsis thaliana
ttgggagttgtaaaatt

SEQ ID NO: 165325 - DNA, 17 bp, Arabidopsis thaliana
ttgggatcatactgacc

SEQ ID NO: 165326 - DNA, 17 bp, Arabidopsis thaliana
ttgggatctgttgtgca

SEQ ID NO: 165327 - DNA, 17 bp, Arabidopsis thaliana
ttgggatcttagagcac

SEQ ID NO: 165328 - DNA, 17 bp, Arabidopsis thaliana
ttgggatgaaaaccaac

SEQ ID NO: 165329 - DNA, 17 bp, Arabidopsis thaliana
ttgggatggagaatacc

SEQ ID NO: 165330 - DNA, 17 bp, Arabidopsis thaliana
ttgggatgggtcggccg

SEQ ID NO: 165331 - DNA, 17 bp, Arabidopsis thaliana
ttgggatgggtcggcgg

SEQ ID NO: 165332 - DNA, 17 bp, Arabidopsis thaliana
ttgggatgggtcggggg

SEQ ID NO: 165333 - DNA, 17 bp, Arabidopsis thaliana
ttgggatgggtcggtcg

SEQ ID NO: 165334 - DNA, 17 bp, Arabidopsis thaliana
ttgggatgggtggaatg

SEQ ID NO: 165335 - DNA, 17 bp, Arabidopsis thaliana
ttgggattcgacaatgg

SEQ ID NO: 165336 - DNA, 17 bp, Arabidopsis thaliana
ttgggattctactcggc

SEQ ID NO: 165337 - DNA, 17 bp, Arabidopsis thaliana
ttgggattgtgacacgt

SEQ ID NO: 165338 - DNA, 17 bp, Arabidopsis thaliana
ttgggatttcgcgaagt

SEQ ID NO: 165339 - DNA, 17 bp, Arabidopsis thaliana
ttgggatttgtccaatg

SEQ ID NO: 165340 - DNA, 17 bp, Arabidopsis thaliana
ttgggcaactgcgtggt

SEQ ID NO: 165341 - DNA, 17 bp, Arabidopsis thaliana
ttgggcaccaccacttc

SEQ ID NO: 165342 - DNA, 17 bp, Arabidopsis thaliana
ttgggcaccgccaaatc

SEQ ID NO: 165343 - DNA, 17 bp, Arabidopsis thaliana
ttgggcatatgaccagt

SEQ ID NO: 165344 - DNA, 17 bp, Arabidopsis thaliana
ttgggcatatgcctgct

SEQ ID NO: 165345 - DNA, 17 bp, Arabidopsis thaliana
ttgggcatgtcgttaag

SEQ ID NO: 165346 - DNA, 17 bp, Arabidopsis thaliana
ttgggccgggttcgggt

SEQ ID NO: 165347 - DNA, 17 bp, Arabidopsis thaliana
ttgggcgatacgctcct

SEQ ID NO: 165348 - DNA, 17 bp, Arabidopsis thaliana
ttgggcgatgaagtgca

SEQ ID NO: 165349 - DNA, 17 bp, Arabidopsis thaliana
ttgggcgcctcattctt

SEQ ID NO: 165350 - DNA, 17 bp, Arabidopsis thaliana
ttgggcggaggacattg

SEQ ID NO: 165351 - DNA, 17 bp, Arabidopsis thaliana
ttgggctatattacgga

SEQ ID NO: 165352 - DNA, 17 bp, Arabidopsis thaliana
ttgggctcacggtatag

SEQ ID NO: 165353 - DNA, 17 bp, Arabidopsis thaliana
ttgggctgaagtagttt

SEQ ID NO: 165354 - DNA, 17 bp, Arabidopsis thaliana
ttgggctgtgttgcttt

SEQ ID NO: 165355 - DNA, 17 bp, Arabidopsis thaliana
ttgggcttcgcccgcgc

SEQ ID NO: 165356 - DNA, 17 bp, Arabidopsis thaliana
ttgggcttctgattcgc

SEQ ID NO: 165357 - DNA, 17 bp, Arabidopsis thaliana
ttgggcttctgattcgg

SEQ ID NO: 165358 - DNA, 17 bp, Arabidopsis thaliana
ttgggcttctgtattct

SEQ ID NO: 165359 - DNA, 17 bp, Arabidopsis thaliana
ttgggcttggttttgac

SEQ ID NO: 165360 - DNA, 17 bp, Arabidopsis thaliana
ttgggctttccgaaaag

SEQ ID NO: 165361 - DNA, 17 bp, Arabidopsis thaliana
ttgggctttgcctgcgc

SEQ ID NO: 165362 - DNA, 17 bp, Arabidopsis thaliana
ttgggctttggccccat

SEQ ID NO: 165363 - DNA, 17 bp, Arabidopsis thaliana
ttggggaaagacccggc

SEQ ID NO: 165364 - DNA, 17 bp, Arabidopsis thaliana
ttggggaaccctacaac

SEQ ID NO: 165365 - DNA, 17 bp, Arabidopsis thaliana
ttggggaagaatcgcga

SEQ ID NO: 165366 - DNA, 17 bp, Arabidopsis thaliana
ttggggacgagatgtgt

SEQ ID NO: 165367 - DNA, 17 bp, Arabidopsis thaliana
ttggggacgagatgttt

SEQ ID NO: 165368 - DNA, 17 bp, Arabidopsis thaliana
ttggggacgagattttt

SEQ ID NO: 165369 - DNA, 17 bp, Arabidopsis thaliana
ttggggatatcgtggtg

SEQ ID NO: 165370 - DNA, 17 bp, Arabidopsis thaliana
ttggggatgggtctttt

SEQ ID NO: 165371 - DNA, 17 bp, Arabidopsis thaliana
ttggggattacgttttc

SEQ ID NO: 165372 - DNA, 17 bp, Arabidopsis thaliana
ttggggatttttcagag

SEQ ID NO: 165373 - DNA, 17 bp, Arabidopsis thaliana
ttggggcgggttcattt

SEQ ID NO: 165374 - DNA, 17 bp, Arabidopsis thaliana
ttggggggattacgggc

SEQ ID NO: 165375 - DNA, 17 bp, Arabidopsis thaliana
ttggggtccaagcttgt

SEQ ID NO: 165376 - DNA, 17 bp, Arabidopsis thaliana
ttggggtgatttactgc

SEQ ID NO: 165377 - DNA, 17 bp, Arabidopsis thaliana
ttggggtgcttcagcag

SEQ ID NO: 165378 - DNA, 17 bp, Arabidopsis thaliana
ttggggttgttgcttgt

SEQ ID NO: 165379 - DNA, 17 bp, Arabidopsis thaliana
ttgggtaagggattcat

SEQ ID NO: 165380 - DNA, 17 bp, Arabidopsis thaliana
ttgggtacccacgggta

SEQ ID NO: 165381 - DNA, 17 bp, Arabidopsis thaliana
ttgggtactcgccttta

SEQ ID NO: 165382 - DNA, 17 bp, Arabidopsis thaliana
ttgggtagaccctctgt

SEQ ID NO: 165383 - DNA, 17 bp, Arabidopsis thaliana
ttgggtagctaccacaa

SEQ ID NO: 165384 - DNA, 17 bp, Arabidopsis thaliana
ttgggtcatgtggtttt

SEQ ID NO: 165385 - DNA, 17 bp, Arabidopsis thaliana
ttgggtccaacgttcgg

SEQ ID NO: 165386 - DNA, 17 bp, Arabidopsis thaliana
ttgggtcggaccgatgt

SEQ ID NO: 165387 - DNA, 17 bp, Arabidopsis thaliana
ttgggtcgttgcgagta

SEQ ID NO: 165388 - DNA, 17 bp, Arabidopsis thaliana
ttgggtcgttgcgatta

SEQ ID NO: 165389 - DNA, 17 bp, Arabidopsis thaliana
ttgggtctaggaaattt

SEQ ID NO: 165390 - DNA, 17 bp, Arabidopsis thaliana
ttgggtctcactaccag

SEQ ID NO: 165391 - DNA, 17 bp, Arabidopsis thaliana
ttgggtcttggactcca

SEQ ID NO: 165392 - DNA, 17 bp, Arabidopsis thaliana
ttgggtgaaatcatccg

SEQ ID NO: 165393 - DNA, 17 bp, Arabidopsis thaliana
ttgggtgaacgacctgt

SEQ ID NO: 165394 - DNA, 17 bp, Arabidopsis thaliana
ttgggtgaccacaacaa

SEQ ID NO: 165395 - DNA, 17 bp, Arabidopsis thaliana
ttgggtgatcgttgacc

SEQ ID NO: 165396 - DNA, 17 bp, Arabidopsis thaliana
ttgggtgcagttttgat

SEQ ID NO: 165397 - DNA, 17 bp, Arabidopsis thaliana
ttgggtgcgagaggtcc

SEQ ID NO: 165398 - DNA, 17 bp, Arabidopsis thaliana
ttgggtgctgacgtggt

SEQ ID NO: 165399 - DNA, 17 bp, Arabidopsis thaliana
ttgggtgtcgctgtgtg

SEQ ID NO: 165400 - DNA, 17 bp, Arabidopsis thaliana
ttgggtgtgagtcgtgt

SEQ ID NO: 165401 - DNA, 17 bp, Arabidopsis thaliana
ttgggttaagttacgcc

SEQ ID NO: 165402 - DNA, 17 bp, Arabidopsis thaliana
ttgggttatccattttg

SEQ ID NO: 165403 - DNA, 17 bp, Arabidopsis thaliana
ttgggttatccgagacc

SEQ ID NO: 165404 - DNA, 17 bp, Arabidopsis thaliana
ttgggttccatggaata

SEQ ID NO: 165405 - DNA, 17 bp, Arabidopsis thaliana
ttgggttccggggggag

SEQ ID NO: 165406 - DNA, 17 bp, Arabidopsis thaliana
ttgggttccttacttga

SEQ ID NO: 165407 - DNA, 17 bp, Arabidopsis thaliana
ttgggttccttcccaaa

SEQ ID NO: 165408 - DNA, 17 bp, Arabidopsis thaliana
ttgggttccttctcata

SEQ ID NO: 165409 - DNA, 17 bp, Arabidopsis thaliana
ttgggttcgactcccgg

SEQ ID NO: 165410 - DNA, 17 bp, Arabidopsis thaliana
ttgggttcggctcccgg

SEQ ID NO: 165411 - DNA, 17 bp, Arabidopsis thaliana
ttgggttcgtgtcccac

SEQ ID NO: 165412 - DNA, 17 bp, Arabidopsis thaliana
ttgggttctcccggtag

SEQ ID NO: 165413 - DNA, 17 bp, Arabidopsis thaliana
ttgggttgactctgtgc

SEQ ID NO: 165414 - DNA, 17 bp, Arabidopsis thaliana
ttgggttgccaaggttg

SEQ ID NO: 165415 - DNA, 17 bp, Arabidopsis thaliana
ttgggttgggcttgtag

SEQ ID NO: 165416 - DNA, 17 bp, Arabidopsis thaliana
ttgggttgggcttgttg

SEQ ID NO: 165417 - DNA, 17 bp, Arabidopsis thaliana
ttgggtttagacctctg

SEQ ID NO: 165418 - DNA, 17 bp, Arabidopsis thaliana
ttggtaaaccagcgggt

SEQ ID NO: 165419 - DNA, 17 bp, Arabidopsis thaliana
ttggtaaagaccctatt

SEQ ID NO: 165420 - DNA, 17 bp, Arabidopsis thaliana
ttggtaagcagaactgg

SEQ ID NO: 165421 - DNA, 17 bp, Arabidopsis thaliana
ttggtaaggtgacttgt

SEQ ID NO: 165422 - DNA, 17 bp, Arabidopsis thaliana
ttggtaatgggtgagtt

SEQ ID NO: 165423 - DNA, 17 bp, Arabidopsis thaliana
ttggtaatgggtgcgtt

SEQ ID NO: 165424 - DNA, 17 bp, Arabidopsis thaliana
ttggtaattctttgcgc

SEQ ID NO: 165425 - DNA, 17 bp, Arabidopsis thaliana
ttggtagacacgctgct

SEQ ID NO: 165426 - DNA, 17 bp, Arabidopsis thaliana
ttggtagacgctacgga

SEQ ID NO: 165427 - DNA, 17 bp, Arabidopsis thaliana
ttggtagcccaagggag

SEQ ID NO: 165428 - DNA, 17 bp, Arabidopsis thaliana
ttggtagcttccgtctt

SEQ ID NO: 165429 - DNA, 17 bp, Arabidopsis thaliana
ttggtaggactgggtgg

SEQ ID NO: 165430 - DNA, 17 bp, Arabidopsis thaliana
ttggtatcagagcgatt

SEQ ID NO: 165431 - DNA, 17 bp, Arabidopsis thaliana
ttggtatcccgtggatc

SEQ ID NO: 165432 - DNA, 17 bp, Arabidopsis thaliana
ttggtatgcaccgattt

SEQ ID NO: 165433 - DNA, 17 bp, Arabidopsis thaliana
ttggtatgcgtttgtcc

SEQ ID NO: 165434 - DNA, 17 bp, Arabidopsis thaliana
ttggtatttggtcgcag

SEQ ID NO: 165435 - DNA, 17 bp, Arabidopsis thaliana
ttggtcaaaggctactg

SEQ ID NO: 165436 - DNA, 17 bp, Arabidopsis thaliana
ttggtcaactctctcca

SEQ ID NO: 165437 - DNA, 17 bp, Arabidopsis thaliana
ttggtcaacttaactcg

SEQ ID NO: 165438 - DNA, 17 bp, Arabidopsis thaliana
ttggtcaatggggctat

SEQ ID NO: 165439 - DNA, 17 bp, Arabidopsis thaliana
ttggtcaatgtggctag

SEQ ID NO: 165440 - DNA, 17 bp, Arabidopsis thaliana
ttggtcaatgtggctat

SEQ ID NO: 165441 - DNA, 17 bp, Arabidopsis thaliana
ttggtcaggatactcgg

SEQ ID NO: 165442 - DNA, 17 bp, Arabidopsis thaliana
ttggtcatcgcgcttgg

SEQ ID NO: 165443 - DNA, 17 bp, Arabidopsis thaliana
ttggtcattggacaagc

SEQ ID NO: 165444 - DNA, 17 bp, Arabidopsis thaliana
ttggtccagaccactgt

SEQ ID NO: 165445 - DNA, 17 bp, Arabidopsis thaliana
ttggtcccaaggctcgc

SEQ ID NO: 165446 - DNA, 17 bp, Arabidopsis thaliana
ttggtcccgatcagtat

SEQ ID NO: 165447 - DNA, 17 bp, Arabidopsis thaliana
ttggtccctggcagtga

SEQ ID NO: 165448 - DNA, 17 bp, Arabidopsis thaliana
ttggtccgcaaaatgac

SEQ ID NO: 165449 - DNA, 17 bp, Arabidopsis thaliana
ttggtccgcagcgattt

SEQ ID NO: 165450 - DNA, 17 bp, Arabidopsis thaliana
ttggtccgcagcggttt

SEQ ID NO: 165451 - DNA, 17 bp, Arabidopsis thaliana
ttggtccgctctccatc

SEQ ID NO: 165452 - DNA, 17 bp, Arabidopsis thaliana
ttggtccggaccactgc

SEQ ID NO: 165453 - DNA, 17 bp, Arabidopsis thaliana
ttggtccgtaagttttg

SEQ ID NO: 165454 - DNA, 17 bp, Arabidopsis thaliana
ttggtcctcgtggttag

SEQ ID NO: 165455 - DNA, 17 bp, Arabidopsis thaliana
ttggtcgaaagagttag

SEQ ID NO: 165456 - DNA, 17 bp, Arabidopsis thaliana
ttggtcgaccaagttcc

SEQ ID NO: 165457 - DNA, 17 bp, Arabidopsis thaliana
ttggtcgattaagacag

SEQ ID NO: 165458 - DNA, 17 bp, Arabidopsis thaliana
ttggtcgcatcctgtag

SEQ ID NO: 165459 - DNA, 17 bp, Arabidopsis thaliana
ttggtcgctctaaatcc

SEQ ID NO: 165460 - DNA, 17 bp, Arabidopsis thaliana
ttggtcgctgtcgctgg

SEQ ID NO: 165461 - DNA, 17 bp, Arabidopsis thaliana
ttggtcggcttgcccct

SEQ ID NO: 165462 - DNA, 17 bp, Arabidopsis thaliana
ttggtcggcttgtccct

SEQ ID NO: 165463 - DNA, 17 bp, Arabidopsis thaliana
ttggtcggcttgtccga

SEQ ID NO: 165464 - DNA, 17 bp, Arabidopsis thaliana
ttggtcgtccaacagga

SEQ ID NO: 165465 - DNA, 17 bp, Arabidopsis thaliana
ttggtctagtggtatga

SEQ ID NO: 165466 - DNA, 17 bp, Arabidopsis thaliana
ttggtctcacggtctaa

SEQ ID NO: 165467 - DNA, 17 bp, Arabidopsis thaliana
ttggtctccagctctca

SEQ ID NO: 165468 - DNA, 17 bp, Arabidopsis thaliana
ttggtctcccgtgtgtt

SEQ ID NO: 165469 - DNA, 17 bp, Arabidopsis thaliana
ttggtctcttcatccat

SEQ ID NO: 165470 - DNA, 17 bp, Arabidopsis thaliana
ttggtctcttcttcgct

SEQ ID NO: 165471 - DNA, 17 bp, Arabidopsis thaliana
ttggtctgacacaggcg

SEQ ID NO: 165472 - DNA, 17 bp, Arabidopsis thaliana
ttggtctgcagcacgcg

SEQ ID NO: 165473 - DNA, 17 bp, Arabidopsis thaliana
ttggtctgcagcgattt

SEQ ID NO: 165474 - DNA, 17 bp, Arabidopsis thaliana
ttggtctgcagcggttt

SEQ ID NO: 165475 - DNA, 17 bp, Arabidopsis thaliana
ttggtctgcggcgattt

SEQ ID NO: 165476 - DNA, 17 bp, Arabidopsis thaliana
ttggtctggacccagtt

SEQ ID NO: 165477 - DNA, 17 bp, Arabidopsis thaliana
ttggtctgtagcgattt

SEQ ID NO: 165478 - DNA, 17 bp, Arabidopsis thaliana
ttggtctgtcctctgca

SEQ ID NO: 165479 - DNA, 17 bp, Arabidopsis thaliana
ttggtctgttgtctgct

SEQ ID NO: 165480 - DNA, 17 bp, Arabidopsis thaliana
ttggtgacataggtggc

SEQ ID NO: 165481 - DNA, 17 bp, Arabidopsis thaliana
ttggtgacattggtggc

SEQ ID NO: 165482 - DNA, 17 bp, Arabidopsis thaliana
ttggtgaccgatcatta

SEQ ID NO: 165483 - DNA, 17 bp, Arabidopsis thaliana
ttggtgacctgatgaca

SEQ ID NO: 165484 - DNA, 17 bp, Arabidopsis thaliana
ttggtgatcaactttgc

SEQ ID NO: 165485 - DNA, 17 bp, Arabidopsis thaliana
ttggtgatcctgtttga

SEQ ID NO: 165486 - DNA, 17 bp, Arabidopsis thaliana
ttggtgatcctgtttgt

SEQ ID NO: 165487 - DNA, 17 bp, Arabidopsis thaliana
ttggtgatgtgaatcgc

SEQ ID NO: 165488 - DNA, 17 bp, Arabidopsis thaliana
ttggtgattgacggcca

SEQ ID NO: 165489 - DNA, 17 bp, Arabidopsis thaliana
ttggtgcacccgagaag

SEQ ID NO: 165490 - DNA, 17 bp, Arabidopsis thaliana
ttggtgcataggtggct

SEQ ID NO: 165491 - DNA, 17 bp, Arabidopsis thaliana
ttggtgcatttctacct

SEQ ID NO: 165492 - DNA, 17 bp, Arabidopsis thaliana
ttggtgccaatcgctaa

SEQ ID NO: 165493 - DNA, 17 bp, Arabidopsis thaliana
ttggtgccgacaaccaa

SEQ ID NO: 165494 - DNA, 17 bp, Arabidopsis thaliana
ttggtgccttccatctt

SEQ ID NO: 165495 - DNA, 17 bp, Arabidopsis thaliana
ttggtgcgagtgggcgt

SEQ ID NO: 165496 - DNA, 17 bp, Arabidopsis thaliana
ttggtgcgtttatacca

SEQ ID NO: 165497 - DNA, 17 bp, Arabidopsis thaliana
ttggtgctcggattcgg

SEQ ID NO: 165498 - DNA, 17 bp, Arabidopsis thaliana
ttggtgctgagccgaga

SEQ ID NO: 165499 - DNA, 17 bp, Arabidopsis thaliana
ttggtggaacactggct

SEQ ID NO: 165500 - DNA, 17 bp, Arabidopsis thaliana
ttggtggagcgattggt

SEQ ID NO: 165501 - DNA, 17 bp, Arabidopsis thaliana
ttggtggagcgatttgc

SEQ ID NO: 165502 - DNA, 17 bp, Arabidopsis thaliana
ttggtggagcgatttgt

SEQ ID NO: 165503 - DNA, 17 bp, Arabidopsis thaliana
ttggtggagcgattttg

SEQ ID NO: 165504 - DNA, 17 bp, Arabidopsis thaliana
ttggtggagggatttgt

SEQ ID NO: 165505 - DNA, 17 bp, Arabidopsis thaliana
ttggtggagtgacttgt

SEQ ID NO: 165506 - DNA, 17 bp, Arabidopsis thaliana
ttggtggcgactcgaat

SEQ ID NO: 165507 - DNA, 17 bp, Arabidopsis thaliana
ttggtgggcttagtggg

SEQ ID NO: 165508 - DNA, 17 bp, Arabidopsis thaliana
ttggtggggcgatttgt

SEQ ID NO: 165509 - DNA, 17 bp, Arabidopsis thaliana
ttggtgggtgattcctt

SEQ ID NO: 165510 - DNA, 17 bp, Arabidopsis thaliana
ttggtggttaaactcta

SEQ ID NO: 165511 - DNA, 17 bp, Arabidopsis thaliana
ttggtggttaaactgta

SEQ ID NO: 165512 - DNA, 17 bp, Arabidopsis thaliana
ttggtggttagatgttt

SEQ ID NO: 165513 - DNA, 17 bp, Arabidopsis thaliana
ttggtgtcgttcgacgc

SEQ ID NO: 165514 - DNA, 17 bp, Arabidopsis thaliana
ttggtgtgcattggtcc

SEQ ID NO: 165515 - DNA, 17 bp, Arabidopsis thaliana
ttggtgtgcattggtcg

SEQ ID NO: 165516 - DNA, 17 bp, Arabidopsis thaliana
ttggtgtgcattggtgg

SEQ ID NO: 165517 - DNA, 17 bp, Arabidopsis thaliana
ttggtgtgccacgagaa

SEQ ID NO: 165518 - DNA, 17 bp, Arabidopsis thaliana
ttggtgtggatcctgtc

SEQ ID NO: 165519 - DNA, 17 bp, Arabidopsis thaliana
ttggtgtgtgcgtttgt

SEQ ID NO: 165520 - DNA, 17 bp, Arabidopsis thaliana
ttggtgtgtgctacggt

SEQ ID NO: 165521 - DNA, 17 bp, Arabidopsis thaliana
ttggtgtgtgctacgtt

SEQ ID NO: 165522 - DNA, 17 bp, Arabidopsis thaliana
ttggtgtgtgttacgtt

SEQ ID NO: 165523 - DNA, 17 bp, Arabidopsis thaliana
ttggtgttggtgtggtt

SEQ ID NO: 165524 - DNA, 17 bp, Arabidopsis thaliana
ttggttaagtcaaacag

SEQ ID NO: 165525 - DNA, 17 bp, Arabidopsis thaliana
ttggttacccatatggc

SEQ ID NO: 165526 - DNA, 17 bp, Arabidopsis thaliana
ttggttactgctactgc

SEQ ID NO: 165527 - DNA, 17 bp, Arabidopsis thaliana
ttggttagagttgtccg

SEQ ID NO: 165528 - DNA, 17 bp, Arabidopsis thaliana
ttggttatgggtgcgtt

SEQ ID NO: 165529 - DNA, 17 bp, Arabidopsis thaliana
ttggttatgggtgggtt

SEQ ID NO: 165530 - DNA, 17 bp, Arabidopsis thaliana
ttggttcaacccaggat

SEQ ID NO: 165531 - DNA, 17 bp, Arabidopsis thaliana
ttggttcaaggacttag

SEQ ID NO: 165532 - DNA, 17 bp, Arabidopsis thaliana
ttggttcaccggtcacg

SEQ ID NO: 165533 - DNA, 17 bp, Arabidopsis thaliana
ttggttcctgcgtgggg

SEQ ID NO: 165534 - DNA, 17 bp, Arabidopsis thaliana
ttggttccttggattcc

SEQ ID NO: 165535 - DNA, 17 bp, Arabidopsis thaliana
ttggttcgagtccaagt

SEQ ID NO: 165536 - DNA, 17 bp, Arabidopsis thaliana
ttggttcgccagttgac

SEQ ID NO: 165537 - DNA, 17 bp, Arabidopsis thaliana
ttggttcttcactcgat

SEQ ID NO: 165538 - DNA, 17 bp, Arabidopsis thaliana
ttggttgcccatatggc

SEQ ID NO: 165539 - DNA, 17 bp, Arabidopsis thaliana
ttggttgccttcagaga

SEQ ID NO: 165540 - DNA, 17 bp, Arabidopsis thaliana
ttggttgctaaggtgcg

SEQ ID NO: 165541 - DNA, 17 bp, Arabidopsis thaliana
ttggttggagcttagct

SEQ ID NO: 165542 - DNA, 17 bp, Arabidopsis thaliana
ttggttggtgctgctat

SEQ ID NO: 165543 - DNA, 17 bp, Arabidopsis thaliana
ttggttggtttggttcg

SEQ ID NO: 165544 - DNA, 17 bp, Arabidopsis thaliana
ttggtttagtcactcgc

SEQ ID NO: 165545 - DNA, 17 bp, Arabidopsis thaliana
ttggtttcatcccctct

SEQ ID NO: 165546 - DNA, 17 bp, Arabidopsis thaliana
ttggtttcccaagtttg

SEQ ID NO: 165547 - DNA, 17 bp, Arabidopsis thaliana
ttggtttcgcacgtgct

SEQ ID NO: 165548 - DNA, 17 bp, Arabidopsis thaliana
ttggtttcgcccgaagc

SEQ ID NO: 165549 - DNA, 17 bp, Arabidopsis thaliana
ttggtttcggacctgtg

SEQ ID NO: 165550 - DNA, 17 bp, Arabidopsis thaliana
ttggtttcgttcttcgc

SEQ ID NO: 165551 - DNA, 17 bp, Arabidopsis thaliana
ttggtttgacccgatct

SEQ ID NO: 165552 - DNA, 17 bp, Arabidopsis thaliana
ttggtttgcatgtcgct

SEQ ID NO: 165553 - DNA, 17 bp, Arabidopsis thaliana
ttggtttggttcggatt

SEQ ID NO: 165554 - DNA, 17 bp, Arabidopsis thaliana
ttggtttgtgagaccgt

SEQ ID NO: 165555 - DNA, 17 bp, Arabidopsis thaliana
ttggtttgtgccgcggt

SEQ ID NO: 165556 - DNA, 17 bp, Arabidopsis thaliana
ttggttttacagatttg

SEQ ID NO: 165557 - DNA, 17 bp, Arabidopsis thaliana
ttgtaaccgagcaacaa

SEQ ID NO: 165558 - DNA, 17 bp, Arabidopsis thaliana
ttgtaacgatgtcactt

SEQ ID NO: 165559 - DNA, 17 bp, Arabidopsis thaliana
ttgtaagaccccatctc

SEQ ID NO: 165560 - DNA, 17 bp, Arabidopsis thaliana
ttgtaagttccgtatcg

SEQ ID NO: 165561 - DNA, 17 bp, Arabidopsis thaliana
ttgtacaaaccgcactt

SEQ ID NO: 165562 - DNA, 17 bp, Arabidopsis thaliana
ttgtacacaatggctca

SEQ ID NO: 165563 - DNA, 17 bp, Arabidopsis thaliana
ttgtacacaccgcccgt

SEQ ID NO: 165564 - DNA, 17 bp, Arabidopsis thaliana
ttgtacatccacttcgc

SEQ ID NO: 165565 - DNA, 17 bp, Arabidopsis thaliana
ttgtacatctcgctctc

SEQ ID NO: 165566 - DNA, 17 bp, Arabidopsis thaliana
ttgtaccacatcttcat

SEQ ID NO: 165567 - DNA, 17 bp, Arabidopsis thaliana
ttgtacccatctcgttt

SEQ ID NO: 165568 - DNA, 17 bp, Arabidopsis thaliana
ttgtaccgaaccgtttc

SEQ ID NO: 165569 - DNA, 17 bp, Arabidopsis thaliana
ttgtacggctttggctc

SEQ ID NO: 165570 - DNA, 17 bp, Arabidopsis thaliana
ttgtacgtctcacggcc

SEQ ID NO: 165571 - DNA, 17 bp, Arabidopsis thaliana
ttgtactagataaggcc

SEQ ID NO: 165572 - DNA, 17 bp, Arabidopsis thaliana
ttgtactatggacggga

SEQ ID NO: 165573 - DNA, 17 bp, Arabidopsis thaliana
ttgtactgcacatttcc

SEQ ID NO: 165574 - DNA, 17 bp, Arabidopsis thaliana
ttgtactgctctatctg

SEQ ID NO: 165575 - DNA, 17 bp, Arabidopsis thaliana
ttgtactgtcagttgcg

SEQ ID NO: 165576 - DNA, 17 bp, Arabidopsis thaliana
ttgtacttagtggattc

SEQ ID NO: 165577 - DNA, 17 bp, Arabidopsis thaliana
ttgtagacgattgggag

SEQ ID NO: 165578 - DNA, 17 bp, Arabidopsis thaliana
ttgtagcagtggtttta

SEQ ID NO: 165579 - DNA, 17 bp, Arabidopsis thaliana
ttgtagcagtggttttt

SEQ ID NO: 165580 - DNA, 17 bp, Arabidopsis thaliana
ttgtagctttcttccgg

SEQ ID NO: 165581 - DNA, 17 bp, Arabidopsis thaliana
ttgtagctttcttcctt

SEQ ID NO: 165582 - DNA, 17 bp, Arabidopsis thaliana
ttgtaggacccacgacg

SEQ ID NO: 165583 - DNA, 17 bp, Arabidopsis thaliana
ttgtagtcagtaaaccg

SEQ ID NO: 165584 - DNA, 17 bp, Arabidopsis thaliana
ttgtagtctggagaagc

SEQ ID NO: 165585 - DNA, 17 bp, Arabidopsis thaliana
ttgtagtgatttgctgg

SEQ ID NO: 165586 - DNA, 17 bp, Arabidopsis thaliana
ttgtagtttcatgcgtt

SEQ ID NO: 165587 - DNA, 17 bp, Arabidopsis thaliana
ttgtatcctctaacaat

SEQ ID NO: 165588 - DNA, 17 bp, Arabidopsis thaliana
ttgtatcctgtcggcca

SEQ ID NO: 165589 - DNA, 17 bp, Arabidopsis thaliana
ttgtatgctcgatcgcc

SEQ ID NO: 165590 - DNA, 17 bp, Arabidopsis thaliana
ttgtatggcctcgatac

SEQ ID NO: 165591 - DNA, 17 bp, Arabidopsis thaliana
ttgtattccaggctgag

SEQ ID NO: 165592 - DNA, 17 bp, Arabidopsis thaliana
ttgtattcccgtcttct

SEQ ID NO: 165593 - DNA, 17 bp, Arabidopsis thaliana
ttgtattcctccgccat

SEQ ID NO: 165594 - DNA, 17 bp, Arabidopsis thaliana
ttgtattctaccttggt

SEQ ID NO: 165595 - DNA, 17 bp, Arabidopsis thaliana
ttgtcaacaaggccaat

SEQ ID NO: 165596 - DNA, 17 bp, Arabidopsis thaliana
ttgtcaacaccggtggt

SEQ ID NO: 165597 - DNA, 17 bp, Arabidopsis thaliana
ttgtcaacatgtctatc

SEQ ID NO: 165598 - DNA, 17 bp, Arabidopsis thaliana
ttgtcaacggagttcat

SEQ ID NO: 165599 - DNA, 17 bp, Arabidopsis thaliana
ttgtcaacgtctctgca

SEQ ID NO: 165600 - DNA, 17 bp, Arabidopsis thaliana
ttgtcaatcttgggctc

SEQ ID NO: 165601 - DNA, 17 bp, Arabidopsis thaliana
ttgtcaccggagcttcc

SEQ ID NO: 165602 - DNA, 17 bp, Arabidopsis thaliana
ttgtcacggatgaagca

SEQ ID NO: 165603 - DNA, 17 bp, Arabidopsis thaliana
ttgtcactatttagtcg

SEQ ID NO: 165604 - DNA, 17 bp, Arabidopsis thaliana
ttgtcactatttagttg

SEQ ID NO: 165605 - DNA, 17 bp, Arabidopsis thaliana
ttgtcactgcttatgga

SEQ ID NO: 165606 - DNA, 17 bp, Arabidopsis thaliana
ttgtcagactatgtcga

SEQ ID NO: 165607 - DNA, 17 bp, Arabidopsis thaliana
ttgtcagccctttgtcg

SEQ ID NO: 165608 - DNA, 17 bp, Arabidopsis thaliana
ttgtcagcccttttcgc

SEQ ID NO: 165609 - DNA, 17 bp, Arabidopsis thaliana
ttgtcagctttaaacct

SEQ ID NO: 165610 - DNA, 17 bp, Arabidopsis thaliana
ttgtcagctttgaacga

SEQ ID NO: 165611 - DNA, 17 bp, Arabidopsis thaliana
ttgtcaggcggggagtt

SEQ ID NO: 165612 - DNA, 17 bp, Arabidopsis thaliana
ttgtcaggtggggagtt

SEQ ID NO: 165613 - DNA, 17 bp, Arabidopsis thaliana
ttgtcagtcgtatgtca

SEQ ID NO: 165614 - DNA, 17 bp, Arabidopsis thaliana
ttgtcagtgcgtttcta

SEQ ID NO: 165615 - DNA, 17 bp, Arabidopsis thaliana
ttgtcagttttgaacaa

SEQ ID NO: 165616 - DNA, 17 bp, Arabidopsis thaliana
ttgtcataacggctcaa

SEQ ID NO: 165617 - DNA, 17 bp, Arabidopsis thaliana
ttgtcatccgtgatgga

SEQ ID NO: 165618 - DNA, 17 bp, Arabidopsis thaliana
ttgtcatcgagtatgca

SEQ ID NO: 165619 - DNA, 17 bp, Arabidopsis thaliana
ttgtcatcgtgaacagg

SEQ ID NO: 165620 - DNA, 17 bp, Arabidopsis thaliana
ttgtcatctctggtgta

SEQ ID NO: 165621 - DNA, 17 bp, Arabidopsis thaliana
ttgtcatgattgattcg

SEQ ID NO: 165622 - DNA, 17 bp, Arabidopsis thaliana
ttgtcatgttgacttcg

SEQ ID NO: 165623 - DNA, 17 bp, Arabidopsis thaliana
ttgtcattaagctcagt

SEQ ID NO: 165624 - DNA, 17 bp, Arabidopsis thaliana
ttgtcattcaacgcttc

SEQ ID NO: 165625 - DNA, 17 bp, Arabidopsis thaliana
ttgtcattccggccaac

SEQ ID NO: 165626 - DNA, 17 bp, Arabidopsis thaliana
ttgtcattcctggtgcg

SEQ ID NO: 165627 - DNA, 17 bp, Arabidopsis thaliana
ttgtcattctgtccacc

SEQ ID NO: 165628 - DNA, 17 bp, Arabidopsis thaliana
ttgtcatttcgggaggt

SEQ ID NO: 165629 - DNA, 17 bp, Arabidopsis thaliana
ttgtccaactggtttac

SEQ ID NO: 165630 - DNA, 17 bp, Arabidopsis thaliana
ttgtccaaggatgtgca

SEQ ID NO: 165631 - DNA, 17 bp, Arabidopsis thaliana
ttgtccaatttgccctc

SEQ ID NO: 165632 - DNA, 17 bp, Arabidopsis thaliana
ttgtccaatttttctaa

SEQ ID NO: 165633 - DNA, 17 bp, Arabidopsis thaliana
ttgtccacctactgcgg

SEQ ID NO: 165634 - DNA, 17 bp, Arabidopsis thaliana
ttgtccacgaaattcca

SEQ ID NO: 165635 - DNA, 17 bp, Arabidopsis thaliana
ttgtccagcgatggtga

SEQ ID NO: 165636 - DNA, 17 bp, Arabidopsis thaliana
ttgtccagctagttcgc

SEQ ID NO: 165637 - DNA, 17 bp, Arabidopsis thaliana
ttgtccaggatctcaac

SEQ ID NO: 165638 - DNA, 17 bp, Arabidopsis thaliana
ttgtccataaccactaa

SEQ ID NO: 165639 - DNA, 17 bp, Arabidopsis thaliana
ttgtccatacggtcaag

SEQ ID NO: 165640 - DNA, 17 bp, Arabidopsis thaliana
ttgtccatcctgtagat

SEQ ID NO: 165641 - DNA, 17 bp, Arabidopsis thaliana
ttgtccatggtgtcggc

SEQ ID NO: 165642 - DNA, 17 bp, Arabidopsis thaliana
ttgtcccaaaaccagta

SEQ ID NO: 165643 - DNA, 17 bp, Arabidopsis thaliana
ttgtcccagttggccgt

SEQ ID NO: 165644 - DNA, 17 bp, Arabidopsis thaliana
ttgtccccgatttcacc

SEQ ID NO: 165645 - DNA, 17 bp, Arabidopsis thaliana
ttgtcccgaaaaaccga

SEQ ID NO: 165646 - DNA, 17 bp, Arabidopsis thaliana
ttgtcccgaagctgtag

SEQ ID NO: 165647 - DNA, 17 bp, Arabidopsis thaliana
ttgtccctcgcagaatt

SEQ ID NO: 165648 - DNA, 17 bp, Arabidopsis thaliana
ttgtccctcttcgctgc

SEQ ID NO: 165649 - DNA, 17 bp, Arabidopsis thaliana
ttgtcccttcggtcggc

SEQ ID NO: 165650 - DNA, 17 bp, Arabidopsis thaliana
ttgtccgaggcgtctat

SEQ ID NO: 165651 - DNA, 17 bp, Arabidopsis thaliana
ttgtccgatgaggatgg

SEQ ID NO: 165652 - DNA, 17 bp, Arabidopsis thaliana
ttgtccgccgtaaccat

SEQ ID NO: 165653 - DNA, 17 bp, Arabidopsis thaliana
ttgtccgctgacttagt

SEQ ID NO: 165654 - DNA, 17 bp, Arabidopsis thaliana
ttgtccgcttggaccgc

SEQ ID NO: 165655 - DNA, 17 bp, Arabidopsis thaliana
ttgtccgcttggatcgc

SEQ ID NO: 165656 - DNA, 17 bp, Arabidopsis thaliana
ttgtccgctttgaccac

SEQ ID NO: 165657 - DNA, 17 bp, Arabidopsis thaliana
ttgtccgcttttaccac

SEQ ID NO: 165658 - DNA, 17 bp, Arabidopsis thaliana
ttgtccggaagctgtag

SEQ ID NO: 165659 - DNA, 17 bp, Arabidopsis thaliana
ttgtccggacatgtggc

SEQ ID NO: 165660 - DNA, 17 bp, Arabidopsis thaliana
ttgtccgtattatccgc

SEQ ID NO: 165661 - DNA, 17 bp, Arabidopsis thaliana
ttgtccgtggtagaatc

SEQ ID NO: 165662 - DNA, 17 bp, Arabidopsis thaliana
ttgtccgttaataagtc

SEQ ID NO: 165663 - DNA, 17 bp, Arabidopsis thaliana
ttgtccgttgtgcagac

SEQ ID NO: 165664 - DNA, 17 bp, Arabidopsis thaliana
ttgtcctcaactcgcta

SEQ ID NO: 165665 - DNA, 17 bp, Arabidopsis thaliana
ttgtcctcactcgcatg

SEQ ID NO: 165666 - DNA, 17 bp, Arabidopsis thaliana
ttgtcctcagactactc

SEQ ID NO: 165667 - DNA, 17 bp, Arabidopsis thaliana
ttgtcctcctaagaaaa

SEQ ID NO: 165668 - DNA, 17 bp, Arabidopsis thaliana
ttgtcctctccaagttg

SEQ ID NO: 165669 - DNA, 17 bp, Arabidopsis thaliana
ttgtcctctgcattggt

SEQ ID NO: 165670 - DNA, 17 bp, Arabidopsis thaliana
ttgtcctgaagtgtaga

SEQ ID NO: 165671 - DNA, 17 bp, Arabidopsis thaliana
ttgtcctgcttcttgca

SEQ ID NO: 165672 - DNA, 17 bp, Arabidopsis thaliana
ttgtccttaagcgggtt

SEQ ID NO: 165673 - DNA, 17 bp, Arabidopsis thaliana
ttgtccttgatcggctt

SEQ ID NO: 165674 - DNA, 17 bp, Arabidopsis thaliana
ttgtccttgtggtggac

SEQ ID NO: 165675 - DNA, 17 bp, Arabidopsis thaliana
ttgtcgattcaccggat

SEQ ID NO: 165676 - DNA, 17 bp, Arabidopsis thaliana
ttgtcgatttcaccgtc

SEQ ID NO: 165677 - DNA, 17 bp, Arabidopsis thaliana
ttgtcgcatcctgtaga

SEQ ID NO: 165678 - DNA, 17 bp, Arabidopsis thaliana
ttgtcgcattctgtata

SEQ ID NO: 165679 - DNA, 17 bp, Arabidopsis thaliana
ttgtcgccactacaatc

SEQ ID NO: 165680 - DNA, 17 bp, Arabidopsis thaliana
ttgtcgccgatttttct

SEQ ID NO: 165681 - DNA, 17 bp, Arabidopsis thaliana
ttgtcgctaagattcga

SEQ ID NO: 165682 - DNA, 17 bp, Arabidopsis thaliana
ttgtcgctcagaaattc

SEQ ID NO: 165683 - DNA, 17 bp, Arabidopsis thaliana
ttgtcgctgagtgacat

SEQ ID NO: 165684 - DNA, 17 bp, Arabidopsis thaliana
ttgtcgctggcgactaa

SEQ ID NO: 165685 - DNA, 17 bp, Arabidopsis thaliana
ttgtcgctttgaagttc

SEQ ID NO: 165686 - DNA, 17 bp, Arabidopsis thaliana
ttgtcggaactgtgcga

SEQ ID NO: 165687 - DNA, 17 bp, Arabidopsis thaliana
ttgtcggcaccaatcat

SEQ ID NO: 165688 - DNA, 17 bp, Arabidopsis thaliana
ttgtcggccttgtcctt

SEQ ID NO: 165689 - DNA, 17 bp, Arabidopsis thaliana
ttgtcggcgagactcgg

SEQ ID NO: 165690 - DNA, 17 bp, Arabidopsis thaliana
ttgtcggcgccaatcat

SEQ ID NO: 165691 - DNA, 17 bp, Arabidopsis thaliana
ttgtcggctgtgcagat

SEQ ID NO: 165692 - DNA, 17 bp, Arabidopsis thaliana
ttgtcgggagggaagcc

SEQ ID NO: 165693 - DNA, 17 bp, Arabidopsis thaliana
ttgtcgggagggaagcg

SEQ ID NO: 165694 - DNA, 17 bp, Arabidopsis thaliana
ttgtcgggatggaagcg

SEQ ID NO: 165695 - DNA, 17 bp, Arabidopsis thaliana
ttgtcgtcacactgtta

SEQ ID NO: 165696 - DNA, 17 bp, Arabidopsis thaliana
ttgtcgtcacagcacag

SEQ ID NO: 165697 - DNA, 17 bp, Arabidopsis thaliana
ttgtcgtccagcggtta

SEQ ID NO: 165698 - DNA, 17 bp, Arabidopsis thaliana
ttgtcgtccttgaacat

SEQ ID NO: 165699 - DNA, 17 bp, Arabidopsis thaliana
ttgtcgtcgatgaaccg

SEQ ID NO: 165700 - DNA, 17 bp, Arabidopsis thaliana
ttgtcgtcggtgtgagg

SEQ ID NO: 165701 - DNA, 17 bp, Arabidopsis thaliana
ttgtcgtcgtgcggatc

SEQ ID NO: 165702 - DNA, 17 bp, Arabidopsis thaliana
ttgtcgtgcggagtttc

SEQ ID NO: 165703 - DNA, 17 bp, Arabidopsis thaliana
ttgtcgttagccaagca

SEQ ID NO: 165704 - DNA, 17 bp, Arabidopsis thaliana
ttgtcgttagccaagct

SEQ ID NO: 165705 - DNA, 17 bp, Arabidopsis thaliana
ttgtctaaccgaccgat

SEQ ID NO: 165706 - DNA, 17 bp, Arabidopsis thaliana
ttgtctaaccgaccgtc

SEQ ID NO: 165707 - DNA, 17 bp, Arabidopsis thaliana
ttgtctacagccgaaga

SEQ ID NO: 165708 - DNA, 17 bp, Arabidopsis thaliana
ttgtctaccgatcggat

SEQ ID NO: 165709 - DNA, 17 bp, Arabidopsis thaliana
ttgtctaccgtccggat

SEQ ID NO: 165710 - DNA, 17 bp, Arabidopsis thaliana
ttgtctaccttgagctg

SEQ ID NO: 165711 - DNA, 17 bp, Arabidopsis thaliana
ttgtctacgtcgtcttc

SEQ ID NO: 165712 - DNA, 17 bp, Arabidopsis thaliana
ttgtctagacttctggt

SEQ ID NO: 165713 - DNA, 17 bp, Arabidopsis thaliana
ttgtctatatccggctc

SEQ ID NO: 165714 - DNA, 17 bp, Arabidopsis thaliana
ttgtctcaaagattaag

SEQ ID NO: 165715 - DNA, 17 bp, Arabidopsis thaliana
ttgtctcagcgacagat

SEQ ID NO: 165716 - DNA, 17 bp, Arabidopsis thaliana
ttgtctcattgcagcac

SEQ ID NO: 165717 - DNA, 17 bp, Arabidopsis thaliana
ttgtctccaaggcctta

SEQ ID NO: 165718 - DNA, 17 bp, Arabidopsis thaliana
ttgtctccatgataact

SEQ ID NO: 165719 - DNA, 17 bp, Arabidopsis thaliana
ttgtctccggagagtcc

SEQ ID NO: 165720 - DNA, 17 bp, Arabidopsis thaliana
ttgtctccggtcttctt

SEQ ID NO: 165721 - DNA, 17 bp, Arabidopsis thaliana
ttgtctcctcgaatggc

SEQ ID NO: 165722 - DNA, 17 bp, Arabidopsis thaliana
ttgtctcctctagaatt

SEQ ID NO: 165723 - DNA, 17 bp, Arabidopsis thaliana
ttgtctcgggtgatggc

SEQ ID NO: 165724 - DNA, 17 bp, Arabidopsis thaliana
ttgtctcgtggattcgt

SEQ ID NO: 165725 - DNA, 17 bp, Arabidopsis thaliana
ttgtctctacggtgaac

SEQ ID NO: 165726 - DNA, 17 bp, Arabidopsis thaliana
ttgtctctatccaaatc

SEQ ID NO: 165727 - DNA, 17 bp, Arabidopsis thaliana
ttgtctctctctcactt

SEQ ID NO: 165728 - DNA, 17 bp, Arabidopsis thaliana
ttgtctctggttactgt

SEQ ID NO: 165729 - DNA, 17 bp, Arabidopsis thaliana
ttgtctcttccgacatt

SEQ ID NO: 165730 - DNA, 17 bp, Arabidopsis thaliana
ttgtctgagattttgtc

SEQ ID NO: 165731 - DNA, 17 bp, Arabidopsis thaliana
ttgtctgattcgagggg

SEQ ID NO: 165732 - DNA, 17 bp, Arabidopsis thaliana
ttgtctgccactgagtt

SEQ ID NO: 165733 - DNA, 17 bp, Arabidopsis thaliana
ttgtctgccgacttagt

SEQ ID NO: 165734 - DNA, 17 bp, Arabidopsis thaliana
ttgtctgcctgggtgtc

SEQ ID NO: 165735 - DNA, 17 bp, Arabidopsis thaliana
ttgtctgcggttccgtc

SEQ ID NO: 165736 - DNA, 17 bp, Arabidopsis thaliana
ttgtctgcggtttagtc

SEQ ID NO: 165737 - DNA, 17 bp, Arabidopsis thaliana
ttgtctgctacagaaat

SEQ ID NO: 165738 - DNA, 17 bp, Arabidopsis thaliana
ttgtctgcttggaccgc

SEQ ID NO: 165739 - DNA, 17 bp, Arabidopsis thaliana
ttgtctgtcggttcggc

SEQ ID NO: 165740 - DNA, 17 bp, Arabidopsis thaliana
ttgtctgtcggttcgtc

SEQ ID NO: 165741 - DNA, 17 bp, Arabidopsis thaliana
ttgtctgttggaccaac

SEQ ID NO: 165742 - DNA, 17 bp, Arabidopsis thaliana
ttgtctgttggtgcgaa

SEQ ID NO: 165743 - DNA, 17 bp, Arabidopsis thaliana
ttgtcttaggcgcctac

SEQ ID NO: 165744 - DNA, 17 bp, Arabidopsis thaliana
ttgtcttaggtcagatt

SEQ ID NO: 165745 - DNA, 17 bp, Arabidopsis thaliana
ttgtcttcctcagcagg

SEQ ID NO: 165746 - DNA, 17 bp, Arabidopsis thaliana
ttgtcttcctccgcctt

SEQ ID NO: 165747 - DNA, 17 bp, Arabidopsis thaliana
ttgtcttctcggtgtac

SEQ ID NO: 165748 - DNA, 17 bp, Arabidopsis thaliana
ttgtcttctgagctcaa

SEQ ID NO: 165749 - DNA, 17 bp, Arabidopsis thaliana
ttgtcttctggtcagtt

SEQ ID NO: 165750 - DNA, 17 bp, Arabidopsis thaliana
ttgtcttgaggcacggc

SEQ ID NO: 165751 - DNA, 17 bp, Arabidopsis thaliana
ttgtcttgcagtgtccg

SEQ ID NO: 165752 - DNA, 17 bp, Arabidopsis thaliana
ttgtcttgcgaatggag

SEQ ID NO: 165753 - DNA, 17 bp, Arabidopsis thaliana
ttgtcttgctttgacac

SEQ ID NO: 165754 - DNA, 17 bp, Arabidopsis thaliana
ttgtctttaccggtgtg

SEQ ID NO: 165755 - DNA, 17 bp, Arabidopsis thaliana
ttgtctttaggaagtgt

SEQ ID NO: 165756 - DNA, 17 bp, Arabidopsis thaliana
ttgtctttccactaagc

SEQ ID NO: 165757 - DNA, 17 bp, Arabidopsis thaliana
ttgtctttcttgcgatt

SEQ ID NO: 165758 - DNA, 17 bp, Arabidopsis thaliana
ttgtctttgctccgcac

SEQ ID NO: 165759 - DNA, 17 bp, Arabidopsis thaliana
ttgtctttgcttcgcac

SEQ ID NO: 165760 - DNA, 17 bp, Arabidopsis thaliana
ttgtctttgtaccaggc

SEQ ID NO: 165761 - DNA, 17 bp, Arabidopsis thaliana
ttgtcttttcacggttc

SEQ ID NO: 165762 - DNA, 17 bp, Arabidopsis thaliana
ttgtgaaactcatttgg

SEQ ID NO: 165763 - DNA, 17 bp, Arabidopsis thaliana
ttgtgaaatgacttgag

SEQ ID NO: 165764 - DNA, 17 bp, Arabidopsis thaliana
ttgtgaaattcgccgtt

SEQ ID NO: 165765 - DNA, 17 bp, Arabidopsis thaliana
ttgtgaaccgccgctgg

SEQ ID NO: 165766 - DNA, 17 bp, Arabidopsis thaliana
ttgtgaacgaaattgcc

SEQ ID NO: 165767 - DNA, 17 bp, Arabidopsis thaliana
ttgtgaacttgaccggg

SEQ ID NO: 165768 - DNA, 17 bp, Arabidopsis thaliana
ttgtgaacttttctgcc

SEQ ID NO: 165769 - DNA, 17 bp, Arabidopsis thaliana
ttgtgaagaatgagagc

SEQ ID NO: 165770 - DNA, 17 bp, Arabidopsis thaliana
ttgtgaagcgtctactc

SEQ ID NO: 165771 - DNA, 17 bp, Arabidopsis thaliana
ttgtgaagtggtgatgt

SEQ ID NO: 165772 - DNA, 17 bp, Arabidopsis thaliana
ttgtgaatcttcttggc

SEQ ID NO: 165773 - DNA, 17 bp, Arabidopsis thaliana
ttgtgaatggttttgga

SEQ ID NO: 165774 - DNA, 17 bp, Arabidopsis thaliana
ttgtgaattcaccatcg

SEQ ID NO: 165775 - DNA, 17 bp, Arabidopsis thaliana
ttgtgaatttttccttg

SEQ ID NO: 165776 - DNA, 17 bp, Arabidopsis thaliana
ttgtgacaatcttaagg

SEQ ID NO: 165777 - DNA, 17 bp, Arabidopsis thaliana
ttgtgaccaacatttac

SEQ ID NO: 165778 - DNA, 17 bp, Arabidopsis thaliana
ttgtgaccatcggagct

SEQ ID NO: 165779 - DNA, 17 bp, Arabidopsis thaliana
ttgtgacccgacttgcc

SEQ ID NO: 165780 - DNA, 17 bp, Arabidopsis thaliana
ttgtgacgagttctcca

SEQ ID NO: 165781 - DNA, 17 bp, Arabidopsis thaliana
ttgtgagacgaatttcg

SEQ ID NO: 165782 - DNA, 17 bp, Arabidopsis thaliana
ttgtgagacggtgaaat

SEQ ID NO: 165783 - DNA, 17 bp, Arabidopsis thaliana
ttgtgagactgcggatt

SEQ ID NO: 165784 - DNA, 17 bp, Arabidopsis thaliana
ttgtgagctgggtttag

SEQ ID NO: 165785 - DNA, 17 bp, Arabidopsis thaliana
ttgtgagtttggctccg

SEQ ID NO: 165786 - DNA, 17 bp, Arabidopsis thaliana
ttgtgatcctttgaatt

SEQ ID NO: 165787 - DNA, 17 bp, Arabidopsis thaliana
ttgtgatctcggtcgat

SEQ ID NO: 165788 - DNA, 17 bp, Arabidopsis thaliana
ttgtgatgctcgtcagg

SEQ ID NO: 165789 - DNA, 17 bp, Arabidopsis thaliana
ttgtgatgtcgaggcgc

SEQ ID NO: 165790 - DNA, 17 bp, Arabidopsis thaliana
ttgtgattccagccaac

SEQ ID NO: 165791 - DNA, 17 bp, Arabidopsis thaliana
ttgtgattccgaacaga

SEQ ID NO: 165792 - DNA, 17 bp, Arabidopsis thaliana
ttgtgattctttctctg

SEQ ID NO: 165793 - DNA, 17 bp, Arabidopsis thaliana
ttgtgattgtaacgagg

SEQ ID NO: 165794 - DNA, 17 bp, Arabidopsis thaliana
ttgtgcaagtcaggctg

SEQ ID NO: 165795 - DNA, 17 bp, Arabidopsis thaliana
ttgtgccgaagcccgta

SEQ ID NO: 165796 - DNA, 17 bp, Arabidopsis thaliana
ttgtgccgatttcgtaa

SEQ ID NO: 165797 - DNA, 17 bp, Arabidopsis thaliana
ttgtgccgccggtgctt

SEQ ID NO: 165798 - DNA, 17 bp, Arabidopsis thaliana
ttgtgccgtcgcagtcg

SEQ ID NO: 165799 - DNA, 17 bp, Arabidopsis thaliana
ttgtgcgaatcaacggt

SEQ ID NO: 165800 - DNA, 17 bp, Arabidopsis thaliana
ttgtgcgaccgaatagg

SEQ ID NO: 165801 - DNA, 17 bp, Arabidopsis thaliana
ttgtgcgagatttggaa

SEQ ID NO: 165802 - DNA, 17 bp, Arabidopsis thaliana
ttgtgcgccgcatagaa

SEQ ID NO: 165803 - DNA, 17 bp, Arabidopsis thaliana
ttgtgcgcttgggaatc

SEQ ID NO: 165804 - DNA, 17 bp, Arabidopsis thaliana
ttgtgcgcttgggagtc

SEQ ID NO: 165805 - DNA, 17 bp, Arabidopsis thaliana
ttgtgcgcttgggagtt

SEQ ID NO: 165806 - DNA, 17 bp, Arabidopsis thaliana
ttgtgcgctttaaccat

SEQ ID NO: 165807 - DNA, 17 bp, Arabidopsis thaliana
ttgtgcgggaaaagcgg

SEQ ID NO: 165808 - DNA, 17 bp, Arabidopsis thaliana
ttgtgcgtccggtcatg

SEQ ID NO: 165809 - DNA, 17 bp, Arabidopsis thaliana
ttgtgcgtccggttatg

SEQ ID NO: 165810 - DNA, 17 bp, Arabidopsis thaliana
ttgtgcgttctgataac

SEQ ID NO: 165811 - DNA, 17 bp, Arabidopsis thaliana
ttgtgctagattttcgt

SEQ ID NO: 165812 - DNA, 17 bp, Arabidopsis thaliana
ttgtgctccaatggtca

SEQ ID NO: 165813 - DNA, 17 bp, Arabidopsis thaliana
ttgtgctctcaccgact

SEQ ID NO: 165814 - DNA, 17 bp, Arabidopsis thaliana
ttgtgctctgcttcttg

SEQ ID NO: 165815 - DNA, 17 bp, Arabidopsis thaliana
ttgtgctgaaacagggt

SEQ ID NO: 165816 - DNA, 17 bp, Arabidopsis thaliana
ttgtgctgacacatcac

SEQ ID NO: 165817 - DNA, 17 bp, Arabidopsis thaliana
ttgtgctgcctcgttac

SEQ ID NO: 165818 - DNA, 17 bp, Arabidopsis thaliana
ttgtgctgctcagatat

SEQ ID NO: 165819 - DNA, 17 bp, Arabidopsis thaliana
ttgtgctggatgagctg

SEQ ID NO: 165820 - DNA, 17 bp, Arabidopsis thaliana
ttgtgcttaattctacg

SEQ ID NO: 165821 - DNA, 17 bp, Arabidopsis thaliana
ttgtgcttacgccaatt

SEQ ID NO: 165822 - DNA, 17 bp, Arabidopsis thaliana
ttgtggaaagttggtta

SEQ ID NO: 165823 - DNA, 17 bp, Arabidopsis thaliana
ttgtggacaatcagact

SEQ ID NO: 165824 - DNA, 17 bp, Arabidopsis thaliana
ttgtggacccaaggcga

SEQ ID NO: 165825 - DNA, 17 bp, Arabidopsis thaliana
ttgtggacccagcagac

SEQ ID NO: 165826 - DNA, 17 bp, Arabidopsis thaliana
ttgtggacccggaatca

SEQ ID NO: 165827 - DNA, 17 bp, Arabidopsis thaliana
ttgtggacggatcttgg

SEQ ID NO: 165828 - DNA, 17 bp, Arabidopsis thaliana
ttgtggacgggtttggc

SEQ ID NO: 165829 - DNA, 17 bp, Arabidopsis thaliana
ttgtggacgtctgttgc

SEQ ID NO: 165830 - DNA, 17 bp, Arabidopsis thaliana
ttgtggacttgttgtag

SEQ ID NO: 165831 - DNA, 17 bp, Arabidopsis thaliana
ttgtggagacgtcgctg

SEQ ID NO: 165832 - DNA, 17 bp, Arabidopsis thaliana
ttgtggagcgatttgtc

SEQ ID NO: 165833 - DNA, 17 bp, Arabidopsis thaliana
ttgtggattctgttcga

SEQ ID NO: 165834 - DNA, 17 bp, Arabidopsis thaliana
ttgtggcaaccacgcaa

SEQ ID NO: 165835 - DNA, 17 bp, Arabidopsis thaliana
ttgtggcaaccacgcca

SEQ ID NO: 165836 - DNA, 17 bp, Arabidopsis thaliana
ttgtggcagccaagcgt

SEQ ID NO: 165837 - DNA, 17 bp, Arabidopsis thaliana
ttgtggcattttccgtt

SEQ ID NO: 165838 - DNA, 17 bp, Arabidopsis thaliana
ttgtggccgtagagaga

SEQ ID NO: 165839 - DNA, 17 bp, Arabidopsis thaliana
ttgtggctatccaccgt

SEQ ID NO: 165840 - DNA, 17 bp, Arabidopsis thaliana
ttgtgggagagagttag

SEQ ID NO: 165841 - DNA, 17 bp, Arabidopsis thaliana
ttgtgggatgggtcggc

SEQ ID NO: 165842 - DNA, 17 bp, Arabidopsis thaliana
ttgtgggctataccctt

SEQ ID NO: 165843 - DNA, 17 bp, Arabidopsis thaliana
ttgtgggcttaagatcg

SEQ ID NO: 165844 - DNA, 17 bp, Arabidopsis thaliana
ttgtggggtcccaccgg

SEQ ID NO: 165845 - DNA, 17 bp, Arabidopsis thaliana
ttgtgggtgtcccaccg

SEQ ID NO: 165846 - DNA, 17 bp, Arabidopsis thaliana
ttgtgggttcgagtccc

SEQ ID NO: 165847 - DNA, 17 bp, Arabidopsis thaliana
ttgtgggttcgggtccc

SEQ ID NO: 165848 - DNA, 17 bp, Arabidopsis thaliana
ttgtgggttcgtgtccc

SEQ ID NO: 165849 - DNA, 17 bp, Arabidopsis thaliana
ttgtggtcaactcgtgc

SEQ ID NO: 165850 - DNA, 17 bp, Arabidopsis thaliana
ttgtggtcctgccattg

SEQ ID NO: 165851 - DNA, 17 bp, Arabidopsis thaliana
ttgtggtgaatggagtg

SEQ ID NO: 165852 - DNA, 17 bp, Arabidopsis thaliana
ttgtggtgcaactgcct

SEQ ID NO: 165853 - DNA, 17 bp, Arabidopsis thaliana
ttgtggtgctggatatg

SEQ ID NO: 165854 - DNA, 17 bp, Arabidopsis thaliana
ttgtggtggagcgattt

SEQ ID NO: 165855 - DNA, 17 bp, Arabidopsis thaliana
ttgtggtgtcgatggcc

SEQ ID NO: 165856 - DNA, 17 bp, Arabidopsis thaliana
ttgtggttaaccattgg

SEQ ID NO: 165857 - DNA, 17 bp, Arabidopsis thaliana
ttgtggttattggactg

SEQ ID NO: 165858 - DNA, 17 bp, Arabidopsis thaliana
ttgtggttcttgcgagt

SEQ ID NO: 165859 - DNA, 17 bp, Arabidopsis thaliana
ttgtgtaacctcgactg

SEQ ID NO: 165860 - DNA, 17 bp, Arabidopsis thaliana
ttgtgtaagtttcggct

SEQ ID NO: 165861 - DNA, 17 bp, Arabidopsis thaliana
ttgtgtacgcactcagg

SEQ ID NO: 165862 - DNA, 17 bp, Arabidopsis thaliana
ttgtgtactttcggttt

SEQ ID NO: 165863 - DNA, 17 bp, Arabidopsis thaliana
ttgtgtagaatgtcgaa

SEQ ID NO: 165864 - DNA, 17 bp, Arabidopsis thaliana
ttgtgtagtgacccacg

SEQ ID NO: 165865 - DNA, 17 bp, Arabidopsis thaliana
ttgtgtagtgaccctcg

SEQ ID NO: 165866 - DNA, 17 bp, Arabidopsis thaliana
ttgtgtatagaccctgg

SEQ ID NO: 165867 - DNA, 17 bp, Arabidopsis thaliana
ttgtgtatcttctaggt

SEQ ID NO: 165868 - DNA, 17 bp, Arabidopsis thaliana
ttgtgtcaggacctacg

SEQ ID NO: 165869 - DNA, 17 bp, Arabidopsis thaliana
ttgtgtcaggatctacg

SEQ ID NO: 165870 - DNA, 17 bp, Arabidopsis thaliana
ttgtgtcaggccctccc

SEQ ID NO: 165871 - DNA, 17 bp, Arabidopsis thaliana
ttgtgtcatggatgtgg

SEQ ID NO: 165872 - DNA, 17 bp, Arabidopsis thaliana
ttgtgtcatgggttggc

SEQ ID NO: 165873 - DNA, 17 bp, Arabidopsis thaliana
ttgtgtccaacagtttg

SEQ ID NO: 165874 - DNA, 17 bp, Arabidopsis thaliana
ttgtgtccagatctaag

SEQ ID NO: 165875 - DNA, 17 bp, Arabidopsis thaliana
ttgtgtccagctgcttg

SEQ ID NO: 165876 - DNA, 17 bp, Arabidopsis thaliana
ttgtgtccgtactctct

SEQ ID NO: 165877 - DNA, 17 bp, Arabidopsis thaliana
ttgtgtcgcttattaaa

SEQ ID NO: 165878 - DNA, 17 bp, Arabidopsis thaliana
ttgtgtcgggacccgaa

SEQ ID NO: 165879 - DNA, 17 bp, Arabidopsis thaliana
ttgtgtcgtgtgcggac

SEQ ID NO: 165880 - DNA, 17 bp, Arabidopsis thaliana
ttgtgtctgtttcgtcc

SEQ ID NO: 165881 - DNA, 17 bp, Arabidopsis thaliana
ttgtgtgaaacggccgg

SEQ ID NO: 165882 - DNA, 17 bp, Arabidopsis thaliana
ttgtgtgaaatggccgg

SEQ ID NO: 165883 - DNA, 17 bp, Arabidopsis thaliana
ttgtgtgacggattcgg

SEQ ID NO: 165884 - DNA, 17 bp, Arabidopsis thaliana
ttgtgtgagttaggccc

SEQ ID NO: 165885 - DNA, 17 bp, Arabidopsis thaliana
ttgtgtgattcaaggat

SEQ ID NO: 165886 - DNA, 17 bp, Arabidopsis thaliana
ttgtgtgcgtgtggata

SEQ ID NO: 165887 - DNA, 17 bp, Arabidopsis thaliana
ttgtgtggcgagatcga

SEQ ID NO: 165888 - DNA, 17 bp, Arabidopsis thaliana
ttgtgttcaggttcgag

SEQ ID NO: 165889 - DNA, 17 bp, Arabidopsis thaliana
ttgtgttcgtctaccat

SEQ ID NO: 165890 - DNA, 17 bp, Arabidopsis thaliana
ttgtgttgaaaaagccc

SEQ ID NO: 165891 - DNA, 17 bp, Arabidopsis thaliana
ttgtgttgactaacctt

SEQ ID NO: 165892 - DNA, 17 bp, Arabidopsis thaliana
ttgtgttgcagtgcgct

SEQ ID NO: 165893 - DNA, 17 bp, Arabidopsis thaliana
ttgtgttgctcagacat

SEQ ID NO: 165894 - DNA, 17 bp, Arabidopsis thaliana
ttgtgttgctcttggcc

SEQ ID NO: 165895 - DNA, 17 bp, Arabidopsis thaliana
ttgtgttgtcactcagg

SEQ ID NO: 165896 - DNA, 17 bp, Arabidopsis thaliana
ttgtgtttaccggcgaa

SEQ ID NO: 165897 - DNA, 17 bp, Arabidopsis thaliana
ttgtgttttctcacaaa

SEQ ID NO: 165898 - DNA, 17 bp, Arabidopsis thaliana
ttgttaactacacggct

SEQ ID NO: 165899 - DNA, 17 bp, Arabidopsis thaliana
ttgttacactttgcgcc

SEQ ID NO: 165900 - DNA, 17 bp, Arabidopsis thaliana
ttgttacccagttcaac

SEQ ID NO: 165901 - DNA, 17 bp, Arabidopsis thaliana
ttgttactatttgaatc

SEQ ID NO: 165902 - DNA, 17 bp, Arabidopsis thaliana
ttgttagccatggtgcg

SEQ ID NO: 165903 - DNA, 17 bp, Arabidopsis thaliana
ttgttagccattttgct

SEQ ID NO: 165904 - DNA, 17 bp, Arabidopsis thaliana
ttgttagcgattggcac

SEQ ID NO: 165905 - DNA, 17 bp, Arabidopsis thaliana
ttgttattcgtcgtatt

SEQ ID NO: 165906 - DNA, 17 bp, Arabidopsis thaliana
ttgttattgaaccatta

SEQ ID NO: 165907 - DNA, 17 bp, Arabidopsis thaliana
ttgttatttttacggat

SEQ ID NO: 165908 - DNA, 17 bp, Arabidopsis thaliana
ttgttcaacagctggga

SEQ ID NO: 165909 - DNA, 17 bp, Arabidopsis thaliana
ttgttcaagggaatggg

SEQ ID NO: 165910 - DNA, 17 bp, Arabidopsis thaliana
ttgttcacaccttttgg

SEQ ID NO: 165911 - DNA, 17 bp, Arabidopsis thaliana
ttgttcaccgtaatgcc

SEQ ID NO: 165912 - DNA, 17 bp, Arabidopsis thaliana
ttgttcacgttgacgcg

SEQ ID NO: 165913 - DNA, 17 bp, Arabidopsis thaliana
ttgttcacttaggattg

SEQ ID NO: 165914 - DNA, 17 bp, Arabidopsis thaliana
ttgttcaggctgtgttg

SEQ ID NO: 165915 - DNA, 17 bp, Arabidopsis thaliana
ttgttcaggctgtgttt

SEQ ID NO: 165916 - DNA, 17 bp, Arabidopsis thaliana
ttgttcatcaacattgt

SEQ ID NO: 165917 - DNA, 17 bp, Arabidopsis thaliana
ttgttcatctaccgaac

SEQ ID NO: 165918 - DNA, 17 bp, Arabidopsis thaliana
ttgttcatttctcatcg

SEQ ID NO: 165919 - DNA, 17 bp, Arabidopsis thaliana
ttgttccacacgagatt

SEQ ID NO: 165920 - DNA, 17 bp, Arabidopsis thaliana
ttgttccactagaaccg

SEQ ID NO: 165921 - DNA, 17 bp, Arabidopsis thaliana
ttgttccattgccttgg

SEQ ID NO: 165922 - DNA, 17 bp, Arabidopsis thaliana
ttgttccgagactacct

SEQ ID NO: 165923 - DNA, 17 bp, Arabidopsis thaliana
ttgttccgagactatcc

SEQ ID NO: 165924 - DNA, 17 bp, Arabidopsis thaliana
ttgttccgcagtacgcc

SEQ ID NO: 165925 - DNA, 17 bp, Arabidopsis thaliana
ttgttccgctagaaccg

SEQ ID NO: 165926 - DNA, 17 bp, Arabidopsis thaliana
ttgttccgctataaccg

SEQ ID NO: 165927 - DNA, 17 bp, Arabidopsis thaliana
ttgttccggtttaacct

SEQ ID NO: 165928 - DNA, 17 bp, Arabidopsis thaliana
ttgttccgtgacaatat

SEQ ID NO: 165929 - DNA, 17 bp, Arabidopsis thaliana
ttgttccttgcgcagta

SEQ ID NO: 165930 - DNA, 17 bp, Arabidopsis thaliana
ttgttccttgcttggta

SEQ ID NO: 165931 - DNA, 17 bp, Arabidopsis thaliana
ttgttccttggatcagt

SEQ ID NO: 165932 - DNA, 17 bp, Arabidopsis thaliana
ttgttcgaatcctgtca

SEQ ID NO: 165933 - DNA, 17 bp, Arabidopsis thaliana
ttgttcgacttcttggg

SEQ ID NO: 165934 - DNA, 17 bp, Arabidopsis thaliana
ttgttcgacttggggct

SEQ ID NO: 165935 - DNA, 17 bp, Arabidopsis thaliana
ttgttcgagtcccctac

SEQ ID NO: 165936 - DNA, 17 bp, Arabidopsis thaliana
ttgttcgatccacgctc

SEQ ID NO: 165937 - DNA, 17 bp, Arabidopsis thaliana
ttgttcgcaagcgtcta

SEQ ID NO: 165938 - DNA, 17 bp, Arabidopsis thaliana
ttgttcgcagatatcga

SEQ ID NO: 165939 - DNA, 17 bp, Arabidopsis thaliana
ttgttcgctgcctgaat

SEQ ID NO: 165940 - DNA, 17 bp, Arabidopsis thaliana
ttgttcgctttgttttg

SEQ ID NO: 165941 - DNA, 17 bp, Arabidopsis thaliana
ttgttcggctgtctttc

SEQ ID NO: 165942 - DNA, 17 bp, Arabidopsis thaliana
ttgttcggttcggtttg

SEQ ID NO: 165943 - DNA, 17 bp, Arabidopsis thaliana
ttgttcgtctgacttgg

SEQ ID NO: 165944 - DNA, 17 bp, Arabidopsis thaliana
ttgttcgttgccgccgc

SEQ ID NO: 165945 - DNA, 17 bp, Arabidopsis thaliana
ttgttcgtttattggtc

SEQ ID NO: 165946 - DNA, 17 bp, Arabidopsis thaliana
ttgttcgtttgactggc

SEQ ID NO: 165947 - DNA, 17 bp, Arabidopsis thaliana
ttgttcgtttgactgtc

SEQ ID NO: 165948 - DNA, 17 bp, Arabidopsis thaliana
ttgttctacaagctgac

SEQ ID NO: 165949 - DNA, 17 bp, Arabidopsis thaliana
ttgttctatttgtgttt

SEQ ID NO: 165950 - DNA, 17 bp, Arabidopsis thaliana
ttgttctccaaggatct

SEQ ID NO: 165951 - DNA, 17 bp, Arabidopsis thaliana
ttgttctccagctcagc

SEQ ID NO: 165952 - DNA, 17 bp, Arabidopsis thaliana
ttgttctctttcttcgg

SEQ ID NO: 165953 - DNA, 17 bp, Arabidopsis thaliana
ttgttctgaccttgttg

SEQ ID NO: 165954 - DNA, 17 bp, Arabidopsis thaliana
ttgttctgcttgatctg

SEQ ID NO: 165955 - DNA, 17 bp, Arabidopsis thaliana
ttgttctgttcctgcca

SEQ ID NO: 165956 - DNA, 17 bp, Arabidopsis thaliana
ttgttcttagcagtgac

SEQ ID NO: 165957 - DNA, 17 bp, Arabidopsis thaliana
ttgttcttccctaagct

SEQ ID NO: 165958 - DNA, 17 bp, Arabidopsis thaliana
ttgttcttcgtacgcat

SEQ ID NO: 165959 - DNA, 17 bp, Arabidopsis thaliana
ttgttcttctatcttgc

SEQ ID NO: 165960 - DNA, 17 bp, Arabidopsis thaliana
ttgttcttttgactgtc

SEQ ID NO: 165961 - DNA, 17 bp, Arabidopsis thaliana
ttgttgaacgcctcctg

SEQ ID NO: 165962 - DNA, 17 bp, Arabidopsis thaliana
ttgttgaagtccgaggt

SEQ ID NO: 165963 - DNA, 17 bp, Arabidopsis thaliana
ttgttgaccagatccat

SEQ ID NO: 165964 - DNA, 17 bp, Arabidopsis thaliana
ttgttgactacacggct

SEQ ID NO: 165965 - DNA, 17 bp, Arabidopsis thaliana
ttgttgactacatggct

SEQ ID NO: 165966 - DNA, 17 bp, Arabidopsis thaliana
ttgttgactcagacaag

SEQ ID NO: 165967 - DNA, 17 bp, Arabidopsis thaliana
ttgttgactgcacggct

SEQ ID NO: 165968 - DNA, 17 bp, Arabidopsis thaliana
ttgttgatccggttgtc

SEQ ID NO: 165969 - DNA, 17 bp, Arabidopsis thaliana
ttgttgatcgctgcgac

SEQ ID NO: 165970 - DNA, 17 bp, Arabidopsis thaliana
ttgttgatggattgcgt

SEQ ID NO: 165971 - DNA, 17 bp, Arabidopsis thaliana
ttgttgattcagctcag

SEQ ID NO: 165972 - DNA, 17 bp, Arabidopsis thaliana
ttgttgatttcacgccg

SEQ ID NO: 165973 - DNA, 17 bp, Arabidopsis thaliana
ttgttgatttcggatat

SEQ ID NO: 165974 - DNA, 17 bp, Arabidopsis thaliana
ttgttgccgctggtcgc

SEQ ID NO: 165975 - DNA, 17 bp, Arabidopsis thaliana
ttgttgcgatacggttt

SEQ ID NO: 165976 - DNA, 17 bp, Arabidopsis thaliana
ttgttgcgctaatggtt

SEQ ID NO: 165977 - DNA, 17 bp, Arabidopsis thaliana
ttgttgcgggaaatcag

SEQ ID NO: 165978 - DNA, 17 bp, Arabidopsis thaliana
ttgttgcgttgcagact

SEQ ID NO: 165979 - DNA, 17 bp, Arabidopsis thaliana
ttgttgctgagactgaa

SEQ ID NO: 165980 - DNA, 17 bp, Arabidopsis thaliana
ttgttgcttccgtctag

SEQ ID NO: 165981 - DNA, 17 bp, Arabidopsis thaliana
ttgttggactcgaccat

SEQ ID NO: 165982 - DNA, 17 bp, Arabidopsis thaliana
ttgttggatctgagatg

SEQ ID NO: 165983 - DNA, 17 bp, Arabidopsis thaliana
ttgttggcagttgttga

SEQ ID NO: 165984 - DNA, 17 bp, Arabidopsis thaliana
ttgttggcagttgttta

SEQ ID NO: 165985 - DNA, 17 bp, Arabidopsis thaliana
ttgttggcgccgttgta

SEQ ID NO: 165986 - DNA, 17 bp, Arabidopsis thaliana
ttgttggctaaagtttt

SEQ ID NO: 165987 - DNA, 17 bp, Arabidopsis thaliana
ttgttggctaccatcac

SEQ ID NO: 165988 - DNA, 17 bp, Arabidopsis thaliana
ttgttggtccaacgact

SEQ ID NO: 165989 - DNA, 17 bp, Arabidopsis thaliana
ttgttggtgacctcgtc

SEQ ID NO: 165990 - DNA, 17 bp, Arabidopsis thaliana
ttgttggtgcgtgcctt

SEQ ID NO: 165991 - DNA, 17 bp, Arabidopsis thaliana
ttgttggttctagccgc

SEQ ID NO: 165992 - DNA, 17 bp, Arabidopsis thaliana
ttgttgtactcggtcta

SEQ ID NO: 165993 - DNA, 17 bp, Arabidopsis thaliana
ttgttgtcactcagggc

SEQ ID NO: 165994 - DNA, 17 bp, Arabidopsis thaliana
ttgttgtcccatcaccg

SEQ ID NO: 165995 - DNA, 17 bp, Arabidopsis thaliana
ttgttgtcctctccaaa

SEQ ID NO: 165996 - DNA, 17 bp, Arabidopsis thaliana
ttgttgtcgctggtcac

SEQ ID NO: 165997 - DNA, 17 bp, Arabidopsis thaliana
ttgttgtcgctggtcgc

SEQ ID NO: 165998 - DNA, 17 bp, Arabidopsis thaliana
ttgttgtcgctgtcgct

SEQ ID NO: 165999 - DNA, 17 bp, Arabidopsis thaliana
ttgttgtcggaggtgct

SEQ ID NO: 166000 - DNA, 17 bp, Arabidopsis thaliana
ttgttgtgaccaacatt

SEQ ID NO: 166001 - DNA, 17 bp, Arabidopsis thaliana
ttgttgtgattctgtct

SEQ ID NO: 166002 - DNA, 17 bp, Arabidopsis thaliana
ttgttgtgtccaagtcc

SEQ ID NO: 166003 - DNA, 17 bp, Arabidopsis thaliana
ttgttgtgtccgacttg

SEQ ID NO: 166004 - DNA, 17 bp, Arabidopsis thaliana
ttgttgtgtctctctac

SEQ ID NO: 166005 - DNA, 17 bp, Arabidopsis thaliana
ttgttgttaccatgcga

SEQ ID NO: 166006 - DNA, 17 bp, Arabidopsis thaliana
ttgttgttcttgagtac

SEQ ID NO: 166007 - DNA, 17 bp, Arabidopsis thaliana
ttgttgttgacagccac

SEQ ID NO: 166008 - DNA, 17 bp, Arabidopsis thaliana
ttgttgtttctcggatt

SEQ ID NO: 166009 - DNA, 17 bp, Arabidopsis thaliana
ttgttgtttcttgaccc

SEQ ID NO: 166010 - DNA, 17 bp, Arabidopsis thaliana
ttgtttaccattgcgtt

SEQ ID NO: 166011 - DNA, 17 bp, Arabidopsis thaliana
ttgtttacccattcatc

SEQ ID NO: 166012 - DNA, 17 bp, Arabidopsis thaliana
ttgtttaccgtaatgcc

SEQ ID NO: 166013 - DNA, 17 bp, Arabidopsis thaliana
ttgtttatccgttgcat

SEQ ID NO: 166014 - DNA, 17 bp, Arabidopsis thaliana
ttgtttcaccacttttg

SEQ ID NO: 166015 - DNA, 17 bp, Arabidopsis thaliana
ttgtttcagggtcaaca

SEQ ID NO: 166016 - DNA, 17 bp, Arabidopsis thaliana
ttgtttcattttcagtc

SEQ ID NO: 166017 - DNA, 17 bp, Arabidopsis thaliana
ttgtttccattcgaagc

SEQ ID NO: 166018 - DNA, 17 bp, Arabidopsis thaliana
ttgtttccattctcctt

SEQ ID NO: 166019 - DNA, 17 bp, Arabidopsis thaliana
ttgtttcccttctcgtc

SEQ ID NO: 166020 - DNA, 17 bp, Arabidopsis thaliana
ttgtttccgctctgcac

SEQ ID NO: 166021 - DNA, 17 bp, Arabidopsis thaliana
ttgtttcctcaatgact

SEQ ID NO: 166022 - DNA, 17 bp, Arabidopsis thaliana
ttgtttccttcgtggtg

SEQ ID NO: 166023 - DNA, 17 bp, Arabidopsis thaliana
ttgtttcgggtcataac

SEQ ID NO: 166024 - DNA, 17 bp, Arabidopsis thaliana
ttgtttctcagcattca

SEQ ID NO: 166025 - DNA, 17 bp, Arabidopsis thaliana
ttgtttctggagtgacc

SEQ ID NO: 166026 - DNA, 17 bp, Arabidopsis thaliana
ttgtttctgtcttggcc

SEQ ID NO: 166027 - DNA, 17 bp, Arabidopsis thaliana
ttgtttcttcttcggcg

SEQ ID NO: 166028 - DNA, 17 bp, Arabidopsis thaliana
ttgtttcttcttgcgac

SEQ ID NO: 166029 - DNA, 17 bp, Arabidopsis thaliana
ttgtttgaccattcaca

SEQ ID NO: 166030 - DNA, 17 bp, Arabidopsis thaliana
ttgtttgacgaagatgt

SEQ ID NO: 166031 - DNA, 17 bp, Arabidopsis thaliana
ttgtttgactcgtgtcg

SEQ ID NO: 166032 - DNA, 17 bp, Arabidopsis thaliana
ttgtttggaccacattt

SEQ ID NO: 166033 - DNA, 17 bp, Arabidopsis thaliana
ttgtttggctctcaaga

SEQ ID NO: 166034 - DNA, 17 bp, Arabidopsis thaliana
ttgtttgtaacgccgag

SEQ ID NO: 166035 - DNA, 17 bp, Arabidopsis thaliana
ttgtttgtcatccgagt

SEQ ID NO: 166036 - DNA, 17 bp, Arabidopsis thaliana
ttgtttgtcatcgccgc

SEQ ID NO: 166037 - DNA, 17 bp, Arabidopsis thaliana
ttgtttgtccgttgcta

SEQ ID NO: 166038 - DNA, 17 bp, Arabidopsis thaliana
ttgtttgtgttgcactt

SEQ ID NO: 166039 - DNA, 17 bp, Arabidopsis thaliana
ttgtttgttggaccaac

SEQ ID NO: 166040 - DNA, 17 bp, Arabidopsis thaliana
ttgttttcctccagaat

SEQ ID NO: 166041 - DNA, 17 bp, Arabidopsis thaliana
ttgttttcgtgatttgg

SEQ ID NO: 166042 - DNA, 17 bp, Arabidopsis thaliana
ttgttttcgtggctttg

SEQ ID NO: 166043 - DNA, 17 bp, Arabidopsis thaliana
ttgttttgtttcttgcg

SEQ ID NO: 166044 - DNA, 17 bp, Arabidopsis thaliana
ttgtttttaggttgatt

SEQ ID NO: 166045 - DNA, 17 bp, Arabidopsis thaliana
ttgtttttatcccttgc

SEQ ID NO: 166046 - DNA, 17 bp, Arabidopsis thaliana
ttgtttttccgacatgc

SEQ ID NO: 166047 - DNA, 17 bp, Arabidopsis thaliana
ttgtttttgctgctagc

SEQ ID NO: 166048 - DNA, 17 bp, Arabidopsis thaliana
ttgtttttggctgtgct

SEQ ID NO: 166049 - DNA, 17 bp, Arabidopsis thaliana
ttgttttttggtcgtcc

SEQ ID NO: 166050 - DNA, 17 bp, Arabidopsis thaliana
tttaaaacccacacccg

SEQ ID NO: 166051 - DNA, 17 bp, Arabidopsis thaliana
tttaaaacctttccatt

SEQ ID NO: 166052 - DNA, 17 bp, Arabidopsis thaliana
tttaaaactctatcggc

SEQ ID NO: 166053 - DNA, 17 bp, Arabidopsis thaliana
tttaaaactgggtcgcg

SEQ ID NO: 166054 - DNA, 17 bp, Arabidopsis thaliana
tttaaaataccgtgtgt

SEQ ID NO: 166055 - DNA, 17 bp, Arabidopsis thaliana
tttaaaatacttgggat

SEQ ID NO: 166056 - DNA, 17 bp, Arabidopsis thaliana
tttaaaatcatcaggca

SEQ ID NO: 166057 - DNA, 17 bp, Arabidopsis thaliana
tttaaaatcctatgtgg

SEQ ID NO: 166058 - DNA, 17 bp, Arabidopsis thaliana
tttaaaccacgagtttg

SEQ ID NO: 166059 - DNA, 17 bp, Arabidopsis thaliana
tttaaaccgcagttaaa

SEQ ID NO: 166060 - DNA, 17 bp, Arabidopsis thaliana
tttaaacgaccgatgaa

SEQ ID NO: 166061 - DNA, 17 bp, Arabidopsis thaliana
tttaaactgctgtgaca

SEQ ID NO: 166062 - DNA, 17 bp, Arabidopsis thaliana
tttaaagacggtccgca

SEQ ID NO: 166063 - DNA, 17 bp, Arabidopsis thaliana
tttaaagccaaatcagg

SEQ ID NO: 166064 - DNA, 17 bp, Arabidopsis thaliana
tttaaaggtgaatttga

SEQ ID NO: 166065 - DNA, 17 bp, Arabidopsis thaliana
tttaaatccattggcag

SEQ ID NO: 166066 - DNA, 17 bp, Arabidopsis thaliana
tttaaatcccgtttatc

SEQ ID NO: 166067 - DNA, 17 bp, Arabidopsis thaliana
tttaaatccgtctttgt

SEQ ID NO: 166068 - DNA, 17 bp, Arabidopsis thaliana
tttaaatcgcaggtagc

SEQ ID NO: 166069 - DNA, 17 bp, Arabidopsis thaliana
tttaaatcttgaactct

SEQ ID NO: 166070 - DNA, 17 bp, Arabidopsis thaliana
tttaacaagccaaagtg

SEQ ID NO: 166071 - DNA, 17 bp, Arabidopsis thaliana
tttaacaattgtctcag

SEQ ID NO: 166072 - DNA, 17 bp, Arabidopsis thaliana
tttaacactacgaccgc

SEQ ID NO: 166073 - DNA, 17 bp, Arabidopsis thaliana
tttaacagcctgcccac

SEQ ID NO: 166074 - DNA, 17 bp, Arabidopsis thaliana
tttaacaggtttccgat

SEQ ID NO: 166075 - DNA, 17 bp, Arabidopsis thaliana
tttaaccgtgactgatt

SEQ ID NO: 166076 - DNA, 17 bp, Arabidopsis thaliana
tttaacgacattggacc

SEQ ID NO: 166077 - DNA, 17 bp, Arabidopsis thaliana
tttaacgaccggttgct

SEQ ID NO: 166078 - DNA, 17 bp, Arabidopsis thaliana
tttaacgaggaaaggct

SEQ ID NO: 166079 - DNA, 17 bp, Arabidopsis thaliana
tttaacggctgatcaaa

SEQ ID NO: 166080 - DNA, 17 bp, Arabidopsis thaliana
tttaacggtctgctctt

SEQ ID NO: 166081 - DNA, 17 bp, Arabidopsis thaliana
tttaacgtctcgaatga

SEQ ID NO: 166082 - DNA, 17 bp, Arabidopsis thaliana
tttaacgtctctgactc

SEQ ID NO: 166083 - DNA, 17 bp, Arabidopsis thaliana
tttaacgtgatgtgagt

SEQ ID NO: 166084 - DNA, 17 bp, Arabidopsis thaliana
tttaactagaccatccg

SEQ ID NO: 166085 - DNA, 17 bp, Arabidopsis thaliana
tttaactagataaggcc

SEQ ID NO: 166086 - DNA, 17 bp, Arabidopsis thaliana
tttaactcagtggtaga

SEQ ID NO: 166087 - DNA, 17 bp, Arabidopsis thaliana
tttaactccatgcggca

SEQ ID NO: 166088 - DNA, 17 bp, Arabidopsis thaliana
tttaactgcagttagcg

SEQ ID NO: 166089 - DNA, 17 bp, Arabidopsis thaliana
tttaactggatgaccta

SEQ ID NO: 166090 - DNA, 17 bp, Arabidopsis thaliana
tttaacttcgcatgtga

SEQ ID NO: 166091 - DNA, 17 bp, Arabidopsis thaliana
tttaacttggtgtgagt

SEQ ID NO: 166092 - DNA, 17 bp, Arabidopsis thaliana
tttaagacagggtgacc

SEQ ID NO: 166093 - DNA, 17 bp, Arabidopsis thaliana
tttaagacccatcagcc

SEQ ID NO: 166094 - DNA, 17 bp, Arabidopsis thaliana
tttaagaccgtgaggcc

SEQ ID NO: 166095 - DNA, 17 bp, Arabidopsis thaliana
tttaagacttcgggttc

SEQ ID NO: 166096 - DNA, 17 bp, Arabidopsis thaliana
tttaagacttcgggttt

SEQ ID NO: 166097 - DNA, 17 bp, Arabidopsis thaliana
tttaagatccagttgcg

SEQ ID NO: 166098 - DNA, 17 bp, Arabidopsis thaliana
tttaagatcccgttgcg

SEQ ID NO: 166099 - DNA, 17 bp, Arabidopsis thaliana
tttaagatccggtcgcg

SEQ ID NO: 166100 - DNA, 17 bp, Arabidopsis thaliana
tttaagatccggttgcg

SEQ ID NO: 166101 - DNA, 17 bp, Arabidopsis thaliana
tttaagatcgggttgcg

SEQ ID NO: 166102 - DNA, 17 bp, Arabidopsis thaliana
tttaagatttcgggtcg

SEQ ID NO: 166103 - DNA, 17 bp, Arabidopsis thaliana
tttaagattttggttgc

SEQ ID NO: 166104 - DNA, 17 bp, Arabidopsis thaliana
tttaagcccaaagagag

SEQ ID NO: 166105 - DNA, 17 bp, Arabidopsis thaliana
tttaagcctctagttct

SEQ ID NO: 166106 - DNA, 17 bp, Arabidopsis thaliana
tttaagcgatcagtccc

SEQ ID NO: 166107 - DNA, 17 bp, Arabidopsis thaliana
tttaagctccagaggta

SEQ ID NO: 166108 - DNA, 17 bp, Arabidopsis thaliana
tttaaggcaacgggagc

SEQ ID NO: 166109 - DNA, 17 bp, Arabidopsis thaliana
tttaagggattaagggt

SEQ ID NO: 166110 - DNA, 17 bp, Arabidopsis thaliana
tttaagtccgccgtcaa

SEQ ID NO: 166111 - DNA, 17 bp, Arabidopsis thaliana
tttaagtccgccgtcca

SEQ ID NO: 166112 - DNA, 17 bp, Arabidopsis thaliana
tttaagtcgtcggtttg

SEQ ID NO: 166113 - DNA, 17 bp, Arabidopsis thaliana
tttaagtcttgatgaac

SEQ ID NO: 166114 - DNA, 17 bp, Arabidopsis thaliana
tttaagtgactacatcg

SEQ ID NO: 166115 - DNA, 17 bp, Arabidopsis thaliana
tttaagtgcggttttga

SEQ ID NO: 166116 - DNA, 17 bp, Arabidopsis thaliana
tttaagtgctcccgttc

SEQ ID NO: 166117 - DNA, 17 bp, Arabidopsis thaliana
tttaagtgttgttgtgt

SEQ ID NO: 166118 - DNA, 17 bp, Arabidopsis thaliana
tttaagttgggtgtgtt

SEQ ID NO: 166119 - DNA, 17 bp, Arabidopsis thaliana
tttaatcaactttggca

SEQ ID NO: 166120 - DNA, 17 bp, Arabidopsis thaliana
tttaatcccgcttagga

SEQ ID NO: 166121 - DNA, 17 bp, Arabidopsis thaliana
tttaatccgatccgcaa

SEQ ID NO: 166122 - DNA, 17 bp, Arabidopsis thaliana
tttaatccgcggtacac

SEQ ID NO: 166123 - DNA, 17 bp, Arabidopsis thaliana
tttaatcgggaccgggc

SEQ ID NO: 166124 - DNA, 17 bp, Arabidopsis thaliana
tttaatctacttggccc

SEQ ID NO: 166125 - DNA, 17 bp, Arabidopsis thaliana
tttaatctggtgtgcct

SEQ ID NO: 166126 - DNA, 17 bp, Arabidopsis thaliana
tttaatctggtgtgggt

SEQ ID NO: 166127 - DNA, 17 bp, Arabidopsis thaliana
tttaatgaccaaccttc

SEQ ID NO: 166128 - DNA, 17 bp, Arabidopsis thaliana
tttaatgacccgtcttt

SEQ ID NO: 166129 - DNA, 17 bp, Arabidopsis thaliana
tttaatgagccattcgc

SEQ ID NO: 166130 - DNA, 17 bp, Arabidopsis thaliana
tttaatgatcaaacgcc

SEQ ID NO: 166131 - DNA, 17 bp, Arabidopsis thaliana
tttaatgggcttgttgt

SEQ ID NO: 166132 - DNA, 17 bp, Arabidopsis thaliana
tttaatggtcttggaca

SEQ ID NO: 166133 - DNA, 17 bp, Arabidopsis thaliana
tttaatgtgcggaccaa

SEQ ID NO: 166134 - DNA, 17 bp, Arabidopsis thaliana
tttaattactatcgcac

SEQ ID NO: 166135 - DNA, 17 bp, Arabidopsis thaliana
tttaatttcacgggact

SEQ ID NO: 166136 - DNA, 17 bp, Arabidopsis thaliana
tttaatttcactgtgca

SEQ ID NO: 166137 - DNA, 17 bp, Arabidopsis thaliana
tttaatttccaccgcaa

SEQ ID NO: 166138 - DNA, 17 bp, Arabidopsis thaliana
tttaatttgtcggtgcc

SEQ ID NO: 166139 - DNA, 17 bp, Arabidopsis thaliana
tttacaaaccacgatta

SEQ ID NO: 166140 - DNA, 17 bp, Arabidopsis thaliana
tttacaaacccggaaaa

SEQ ID NO: 166141 - DNA, 17 bp, Arabidopsis thaliana
tttacaaattgattcct

SEQ ID NO: 166142 - DNA, 17 bp, Arabidopsis thaliana
tttacaaccgtgactcc

SEQ ID NO: 166143 - DNA, 17 bp, Arabidopsis thaliana
tttacaacgtgctttga

SEQ ID NO: 166144 - DNA, 17 bp, Arabidopsis thaliana
tttacaactcatgatga

SEQ ID NO: 166145 - DNA, 17 bp, Arabidopsis thaliana
tttacaagtggtaggct

SEQ ID NO: 166146 - DNA, 17 bp, Arabidopsis thaliana
tttacaatggctgtcac

SEQ ID NO: 166147 - DNA, 17 bp, Arabidopsis thaliana
tttacaccaagaggtct

SEQ ID NO: 166148 - DNA, 17 bp, Arabidopsis thaliana
tttacacgagctatgga

SEQ ID NO: 166149 - DNA, 17 bp, Arabidopsis thaliana
tttacagaaccgataac

SEQ ID NO: 166150 - DNA, 17 bp, Arabidopsis thaliana
tttacagacaatgtggt

SEQ ID NO: 166151 - DNA, 17 bp, Arabidopsis thaliana
tttacagacacgccact

SEQ ID NO: 166152 - DNA, 17 bp, Arabidopsis thaliana
tttacagccctatgcac

SEQ ID NO: 166153 - DNA, 17 bp, Arabidopsis thaliana
tttacagccctatgctc

SEQ ID NO: 166154 - DNA, 17 bp, Arabidopsis thaliana
tttacagcggccgtcat

SEQ ID NO: 166155 - DNA, 17 bp, Arabidopsis thaliana
tttacagcggctgtcac

SEQ ID NO: 166156 - DNA, 17 bp, Arabidopsis thaliana
tttacagcggctgtcat

SEQ ID NO: 166157 - DNA, 17 bp, Arabidopsis thaliana
tttacagctattgcccg

SEQ ID NO: 166158 - DNA, 17 bp, Arabidopsis thaliana
tttacagctttcggttg

SEQ ID NO: 166159 - DNA, 17 bp, Arabidopsis thaliana
tttacaggacgagttgg

SEQ ID NO: 166160 - DNA, 17 bp, Arabidopsis thaliana
tttacaggacgggtttg

SEQ ID NO: 166161 - DNA, 17 bp, Arabidopsis thaliana
tttacaggtttacgttt

SEQ ID NO: 166162 - DNA, 17 bp, Arabidopsis thaliana
tttacagtagctgccac

SEQ ID NO: 166163 - DNA, 17 bp, Arabidopsis thaliana
tttacagtggctgccac

SEQ ID NO: 166164 - DNA, 17 bp, Arabidopsis thaliana
tttacagttaagcgtgc

SEQ ID NO: 166165 - DNA, 17 bp, Arabidopsis thaliana
tttacagttgcgggcgc

SEQ ID NO: 166166 - DNA, 17 bp, Arabidopsis thaliana
tttacagttgcgggcgg

SEQ ID NO: 166167 - DNA, 17 bp, Arabidopsis thaliana
tttacatcaagtgcggc

SEQ ID NO: 166168 - DNA, 17 bp, Arabidopsis thaliana
tttacatcaggagtttt

SEQ ID NO: 166169 - DNA, 17 bp, Arabidopsis thaliana
tttacatcggccctgtt

SEQ ID NO: 166170 - DNA, 17 bp, Arabidopsis thaliana
tttacatcggttgcggt

SEQ ID NO: 166171 - DNA, 17 bp, Arabidopsis thaliana
tttacatctcactgccg

SEQ ID NO: 166172 - DNA, 17 bp, Arabidopsis thaliana
tttacatgcaaaaggcc

SEQ ID NO: 166173 - DNA, 17 bp, Arabidopsis thaliana
tttacatgctgtggttt

SEQ ID NO: 166174 - DNA, 17 bp, Arabidopsis thaliana
tttacatggcatgtgag

SEQ ID NO: 166175 - DNA, 17 bp, Arabidopsis thaliana
tttacattcgagatccg

SEQ ID NO: 166176 - DNA, 17 bp, Arabidopsis thaliana
tttaccaaatatggaat

SEQ ID NO: 166177 - DNA, 17 bp, Arabidopsis thaliana
tttaccaacctttcatc

SEQ ID NO: 166178 - DNA, 17 bp, Arabidopsis thaliana
tttaccaaggcgatgat

SEQ ID NO: 166179 - DNA, 17 bp, Arabidopsis thaliana
tttaccactctgtccgc

SEQ ID NO: 166180 - DNA, 17 bp, Arabidopsis thaliana
tttaccactggaccaac

SEQ ID NO: 166181 - DNA, 17 bp, Arabidopsis thaliana
tttaccagtatcttatg

SEQ ID NO: 166182 - DNA, 17 bp, Arabidopsis thaliana
tttaccagtttgttctc

SEQ ID NO: 166183 - DNA, 17 bp, Arabidopsis thaliana
tttaccatccgtgttcg

SEQ ID NO: 166184 - DNA, 17 bp, Arabidopsis thaliana
tttaccattggaccaac

SEQ ID NO: 166185 - DNA, 17 bp, Arabidopsis thaliana
tttaccatttgtcccag

SEQ ID NO: 166186 - DNA, 17 bp, Arabidopsis thaliana
tttacccaactggaaga

SEQ ID NO: 166187 - DNA, 17 bp, Arabidopsis thaliana
tttacccactaaatcaa

SEQ ID NO: 166188 - DNA, 17 bp, Arabidopsis thaliana
tttacccagatggagct

SEQ ID NO: 166189 - DNA, 17 bp, Arabidopsis thaliana
tttacccagcttgttcg

SEQ ID NO: 166190 - DNA, 17 bp, Arabidopsis thaliana
tttacccatcccgtgat

SEQ ID NO: 166191 - DNA, 17 bp, Arabidopsis thaliana
tttaccccggtggcagc

SEQ ID NO: 166192 - DNA, 17 bp, Arabidopsis thaliana
tttacccgtaatttctc

SEQ ID NO: 166193 - DNA, 17 bp, Arabidopsis thaliana
tttacccgtcccgtgat

SEQ ID NO: 166194 - DNA, 17 bp, Arabidopsis thaliana
tttacccgtcctgtgat

SEQ ID NO: 166195 - DNA, 17 bp, Arabidopsis thaliana
tttaccctacgcgccta

SEQ ID NO: 166196 - DNA, 17 bp, Arabidopsis thaliana
tttaccctactgattcc

SEQ ID NO: 166197 - DNA, 17 bp, Arabidopsis thaliana
tttaccctccttccttc

SEQ ID NO: 166198 - DNA, 17 bp, Arabidopsis thaliana
tttacccttagccaaat

SEQ ID NO: 166199 - DNA, 17 bp, Arabidopsis thaliana
tttaccgacgaaatgat

SEQ ID NO: 166200 - DNA, 17 bp, Arabidopsis thaliana
tttaccgacttagctcg

SEQ ID NO: 166201 - DNA, 17 bp, Arabidopsis thaliana
tttaccgatgaaccagc

SEQ ID NO: 166202 - DNA, 17 bp, Arabidopsis thaliana
tttaccgcaacccgacc

SEQ ID NO: 166203 - DNA, 17 bp, Arabidopsis thaliana
tttaccgcaacccgatc

SEQ ID NO: 166204 - DNA, 17 bp, Arabidopsis thaliana
tttaccgcagtttgcga

SEQ ID NO: 166205 - DNA, 17 bp, Arabidopsis thaliana
tttaccgggtccgagga

SEQ ID NO: 166206 - DNA, 17 bp, Arabidopsis thaliana
tttaccggtggagcgat

SEQ ID NO: 166207 - DNA, 17 bp, Arabidopsis thaliana
tttaccggttgtgtcca

SEQ ID NO: 166208 - DNA, 17 bp, Arabidopsis thaliana
tttaccgtcccgaaagt

SEQ ID NO: 166209 - DNA, 17 bp, Arabidopsis thaliana
tttacctactccccgag

SEQ ID NO: 166210 - DNA, 17 bp, Arabidopsis thaliana
tttacctactccccggg

SEQ ID NO: 166211 - DNA, 17 bp, Arabidopsis thaliana
tttacctcaaggaacgt

SEQ ID NO: 166212 - DNA, 17 bp, Arabidopsis thaliana
tttacctcgtggccaag

SEQ ID NO: 166213 - DNA, 17 bp, Arabidopsis thaliana
tttacctgcttatgcgt

SEQ ID NO: 166214 - DNA, 17 bp, Arabidopsis thaliana
tttacctgggtgcactg

SEQ ID NO: 166215 - DNA, 17 bp, Arabidopsis thaliana
tttacctgtgttggctg

SEQ ID NO: 166216 - DNA, 17 bp, Arabidopsis thaliana
tttaccttagctcagtt

SEQ ID NO: 166217 - DNA, 17 bp, Arabidopsis thaliana
tttacgaagacaacgag

SEQ ID NO: 166218 - DNA, 17 bp, Arabidopsis thaliana
tttacgactctcggcaa

SEQ ID NO: 166219 - DNA, 17 bp, Arabidopsis thaliana
tttacgactggttgatc

SEQ ID NO: 166220 - DNA, 17 bp, Arabidopsis thaliana
tttacgagacgggtttg

SEQ ID NO: 166221 - DNA, 17 bp, Arabidopsis thaliana
tttacgagagtcagccg

SEQ ID NO: 166222 - DNA, 17 bp, Arabidopsis thaliana
tttacgagcttacagac

SEQ ID NO: 166223 - DNA, 17 bp, Arabidopsis thaliana
tttacgagtttggcagg

SEQ ID NO: 166224 - DNA, 17 bp, Arabidopsis thaliana
tttacgatcaggggcgg

SEQ ID NO: 166225 - DNA, 17 bp, Arabidopsis thaliana
tttacgatctggcattc

SEQ ID NO: 166226 - DNA, 17 bp, Arabidopsis thaliana
tttacgatctggcattt

SEQ ID NO: 166227 - DNA, 17 bp, Arabidopsis thaliana
tttacgattaagttctc

SEQ ID NO: 166228 - DNA, 17 bp, Arabidopsis thaliana
tttacgattttgacgga

SEQ ID NO: 166229 - DNA, 17 bp, Arabidopsis thaliana
tttacgccttaagatcc

SEQ ID NO: 166230 - DNA, 17 bp, Arabidopsis thaliana
tttacgcctttaagatc

SEQ ID NO: 166231 - DNA, 17 bp, Arabidopsis thaliana
tttacgcgaaaccacgg

SEQ ID NO: 166232 - DNA, 17 bp, Arabidopsis thaliana
tttacgcggattacggt

SEQ ID NO: 166233 - DNA, 17 bp, Arabidopsis thaliana
tttacgcggattaggtg

SEQ ID NO: 166234 - DNA, 17 bp, Arabidopsis thaliana
tttacgcggatttgtgg

SEQ ID NO: 166235 - DNA, 17 bp, Arabidopsis thaliana
tttacgcgtttgcgaat

SEQ ID NO: 166236 - DNA, 17 bp, Arabidopsis thaliana
tttacgcgtttgcgtat

SEQ ID NO: 166237 - DNA, 17 bp, Arabidopsis thaliana
tttacgctcagagaatg

SEQ ID NO: 166238 - DNA, 17 bp, Arabidopsis thaliana
tttacggaatcatctaa

SEQ ID NO: 166239 - DNA, 17 bp, Arabidopsis thaliana
tttacggaccgacagga

SEQ ID NO: 166240 - DNA, 17 bp, Arabidopsis thaliana
tttacggactgttcaga

SEQ ID NO: 166241 - DNA, 17 bp, Arabidopsis thaliana
tttacggattccacaaa

SEQ ID NO: 166242 - DNA, 17 bp, Arabidopsis thaliana
tttacggattccacttt

SEQ ID NO: 166243 - DNA, 17 bp, Arabidopsis thaliana
tttacggattgtggcca

SEQ ID NO: 166244 - DNA, 17 bp, Arabidopsis thaliana
tttacggcaagagtcct

SEQ ID NO: 166245 - DNA, 17 bp, Arabidopsis thaliana
tttacggcaagtttctt

SEQ ID NO: 166246 - DNA, 17 bp, Arabidopsis thaliana
tttacggcgattgtatc

SEQ ID NO: 166247 - DNA, 17 bp, Arabidopsis thaliana
tttacgggacagactta

SEQ ID NO: 166248 - DNA, 17 bp, Arabidopsis thaliana
tttacgggacggattgg

SEQ ID NO: 166249 - DNA, 17 bp, Arabidopsis thaliana
tttacgggacgggttgg

SEQ ID NO: 166250 - DNA, 17 bp, Arabidopsis thaliana
tttacgggacgggtttg

SEQ ID NO: 166251 - DNA, 17 bp, Arabidopsis thaliana
tttacgggatgggtttg

SEQ ID NO: 166252 - DNA, 17 bp, Arabidopsis thaliana
tttacgggcttacgttt

SEQ ID NO: 166253 - DNA, 17 bp, Arabidopsis thaliana
tttacgggcttcggcca

SEQ ID NO: 166254 - DNA, 17 bp, Arabidopsis thaliana
tttacgggttgacggga

SEQ ID NO: 166255 - DNA, 17 bp, Arabidopsis thaliana
tttacgggtttacgtat

SEQ ID NO: 166256 - DNA, 17 bp, Arabidopsis thaliana
tttacgggtttacgttt

SEQ ID NO: 166257 - DNA, 17 bp, Arabidopsis thaliana
tttacgggtttggcagg

SEQ ID NO: 166258 - DNA, 17 bp, Arabidopsis thaliana
tttacggttggtagcga

SEQ ID NO: 166259 - DNA, 17 bp, Arabidopsis thaliana
tttacggttttggcggt

SEQ ID NO: 166260 - DNA, 17 bp, Arabidopsis thaliana
tttacgttcattgccgg

SEQ ID NO: 166261 - DNA, 17 bp, Arabidopsis thaliana
tttacgtttcgtattgg

SEQ ID NO: 166262 - DNA, 17 bp, Arabidopsis thaliana
tttacgtttttggcggg

SEQ ID NO: 166263 - DNA, 17 bp, Arabidopsis thaliana
tttacgtttttggctgg

SEQ ID NO: 166264 - DNA, 17 bp, Arabidopsis thaliana
tttactaaccgggggac

SEQ ID NO: 166265 - DNA, 17 bp, Arabidopsis thaliana
tttactacgaccgggtt

SEQ ID NO: 166266 - DNA, 17 bp, Arabidopsis thaliana
tttactactgggccaac

SEQ ID NO: 166267 - DNA, 17 bp, Arabidopsis thaliana
tttactagccatggact

SEQ ID NO: 166268 - DNA, 17 bp, Arabidopsis thaliana
tttactagggctaacca

SEQ ID NO: 166269 - DNA, 17 bp, Arabidopsis thaliana
tttactagggctaaccg

SEQ ID NO: 166270 - DNA, 17 bp, Arabidopsis thaliana
tttactatcgcacccgc

SEQ ID NO: 166271 - DNA, 17 bp, Arabidopsis thaliana
tttactcgaccacttgt

SEQ ID NO: 166272 - DNA, 17 bp, Arabidopsis thaliana
tttactcgaccgtttca

SEQ ID NO: 166273 - DNA, 17 bp, Arabidopsis thaliana
tttactcggtgcagata

SEQ ID NO: 166274 - DNA, 17 bp, Arabidopsis thaliana
tttactcggttgtggtt

SEQ ID NO: 166275 - DNA, 17 bp, Arabidopsis thaliana
tttactcgtagattatc

SEQ ID NO: 166276 - DNA, 17 bp, Arabidopsis thaliana
tttactctagtccgact

SEQ ID NO: 166277 - DNA, 17 bp, Arabidopsis thaliana
tttactctcggcaacgg

SEQ ID NO: 166278 - DNA, 17 bp, Arabidopsis thaliana
tttactctctgctgtcc

SEQ ID NO: 166279 - DNA, 17 bp, Arabidopsis thaliana
tttactctctgctgtgt

SEQ ID NO: 166280 - DNA, 17 bp, Arabidopsis thaliana
tttactctgctacgccg

SEQ ID NO: 166281 - DNA, 17 bp, Arabidopsis thaliana
tttactctgctgggccg

SEQ ID NO: 166282 - DNA, 17 bp, Arabidopsis thaliana
tttactgactgttcaga

SEQ ID NO: 166283 - DNA, 17 bp, Arabidopsis thaliana
tttactgacttaacgct

SEQ ID NO: 166284 - DNA, 17 bp, Arabidopsis thaliana
tttactgcaacttgtcc

SEQ ID NO: 166285 - DNA, 17 bp, Arabidopsis thaliana
tttactgccggttgatc

SEQ ID NO: 166286 - DNA, 17 bp, Arabidopsis thaliana
tttactgctgctgatgt

SEQ ID NO: 166287 - DNA, 17 bp, Arabidopsis thaliana
tttactgtaccgcgatt

SEQ ID NO: 166288 - DNA, 17 bp, Arabidopsis thaliana
tttactgtttcggaact

SEQ ID NO: 166289 - DNA, 17 bp, Arabidopsis thaliana
tttacttatgcgcagag

SEQ ID NO: 166290 - DNA, 17 bp, Arabidopsis thaliana
tttacttatttacagtg

SEQ ID NO: 166291 - DNA, 17 bp, Arabidopsis thaliana
tttacttggcataatgg

SEQ ID NO: 166292 - DNA, 17 bp, Arabidopsis thaliana
tttacttggcatgtgtg

SEQ ID NO: 166293 - DNA, 17 bp, Arabidopsis thaliana
tttacttggtcgaagct

SEQ ID NO: 166294 - DNA, 17 bp, Arabidopsis thaliana
tttacttgtcgtctgaa

SEQ ID NO: 166295 - DNA, 17 bp, Arabidopsis thaliana
tttacttttttaggtcg

SEQ ID NO: 166296 - DNA, 17 bp, Arabidopsis thaliana
tttacttttttatgtcg

SEQ ID NO: 166297 - DNA, 17 bp, Arabidopsis thaliana
tttagaaagtctgtcag

SEQ ID NO: 166298 - DNA, 17 bp, Arabidopsis thaliana
tttagaaattgagacac

SEQ ID NO: 166299 - DNA, 17 bp, Arabidopsis thaliana
tttagaacgatcccgtt

SEQ ID NO: 166300 - DNA, 17 bp, Arabidopsis thaliana
tttagaactttgagctt

SEQ ID NO: 166301 - DNA, 17 bp, Arabidopsis thaliana
tttagaagatagtctga

SEQ ID NO: 166302 - DNA, 17 bp, Arabidopsis thaliana
tttagaagcgacggaac

SEQ ID NO: 166303 - DNA, 17 bp, Arabidopsis thaliana
tttagaagtttaggacc

SEQ ID NO: 166304 - DNA, 17 bp, Arabidopsis thaliana
tttagaatttccatctt

SEQ ID NO: 166305 - DNA, 17 bp, Arabidopsis thaliana
tttagacagtgaggcca

SEQ ID NO: 166306 - DNA, 17 bp, Arabidopsis thaliana
tttagaccatgaggcca

SEQ ID NO: 166307 - DNA, 17 bp, Arabidopsis thaliana
tttagacccgttcaagt

SEQ ID NO: 166308 - DNA, 17 bp, Arabidopsis thaliana
tttagaccgtgaggcca

SEQ ID NO: 166309 - DNA, 17 bp, Arabidopsis thaliana
tttagaccgtgaggccg

SEQ ID NO: 166310 - DNA, 17 bp, Arabidopsis thaliana
tttagaccgtgaggcct

SEQ ID NO: 166311 - DNA, 17 bp, Arabidopsis thaliana
tttagaccttcggaatt

SEQ ID NO: 166312 - DNA, 17 bp, Arabidopsis thaliana
tttagacgagttcagct

SEQ ID NO: 166313 - DNA, 17 bp, Arabidopsis thaliana
tttagacggtgttgatt

SEQ ID NO: 166314 - DNA, 17 bp, Arabidopsis thaliana
tttagacgtcgttaccg

SEQ ID NO: 166315 - DNA, 17 bp, Arabidopsis thaliana
tttagactctagatttt

SEQ ID NO: 166316 - DNA, 17 bp, Arabidopsis thaliana
tttagacttccaagctt

SEQ ID NO: 166317 - DNA, 17 bp, Arabidopsis thaliana
tttagacttgcagcaac

SEQ ID NO: 166318 - DNA, 17 bp, Arabidopsis thaliana
tttagagatcgcctgtt

SEQ ID NO: 166319 - DNA, 17 bp, Arabidopsis thaliana
tttagaggcctgtgtcc

SEQ ID NO: 166320 - DNA, 17 bp, Arabidopsis thaliana
tttagaggctgctccaa

SEQ ID NO: 166321 - DNA, 17 bp, Arabidopsis thaliana
tttagaggttgcgcaga

SEQ ID NO: 166322 - DNA, 17 bp, Arabidopsis thaliana
tttagaggtttcgcaga

SEQ ID NO: 166323 - DNA, 17 bp, Arabidopsis thaliana
tttagagtttctggccc

SEQ ID NO: 166324 - DNA, 17 bp, Arabidopsis thaliana
tttagatccgagcggag

SEQ ID NO: 166325 - DNA, 17 bp, Arabidopsis thaliana
tttagatcgcaggtagc

SEQ ID NO: 166326 - DNA, 17 bp, Arabidopsis thaliana
tttagatcgcggcgtaa

SEQ ID NO: 166327 - DNA, 17 bp, Arabidopsis thaliana
tttagatcgggttgcgg

SEQ ID NO: 166328 - DNA, 17 bp, Arabidopsis thaliana
tttagcacaagccgaag

SEQ ID NO: 166329 - DNA, 17 bp, Arabidopsis thaliana
tttagcagatgttccct

SEQ ID NO: 166330 - DNA, 17 bp, Arabidopsis thaliana
tttagcagtctaagcgg

SEQ ID NO: 166331 - DNA, 17 bp, Arabidopsis thaliana
tttagccactttttgaa

SEQ ID NO: 166332 - DNA, 17 bp, Arabidopsis thaliana
tttagcccttcgtccct

SEQ ID NO: 166333 - DNA, 17 bp, Arabidopsis thaliana
tttagccgaagtccata

SEQ ID NO: 166334 - DNA, 17 bp, Arabidopsis thaliana
tttagcctcagaccacg

SEQ ID NO: 166335 - DNA, 17 bp, Arabidopsis thaliana
tttagccttgtcgtctc

SEQ ID NO: 166336 - DNA, 17 bp, Arabidopsis thaliana
tttagcgaagcccgtaa

SEQ ID NO: 166337 - DNA, 17 bp, Arabidopsis thaliana
tttagcgacgcgtggtt

SEQ ID NO: 166338 - DNA, 17 bp, Arabidopsis thaliana
tttagcgactcttttca

SEQ ID NO: 166339 - DNA, 17 bp, Arabidopsis thaliana
tttagcggcatttcgga

SEQ ID NO: 166340 - DNA, 17 bp, Arabidopsis thaliana
tttagcgtatgcttccg

SEQ ID NO: 166341 - DNA, 17 bp, Arabidopsis thaliana
tttagcgtttgacagtt

SEQ ID NO: 166342 - DNA, 17 bp, Arabidopsis thaliana
tttagctaagaaaactc

SEQ ID NO: 166343 - DNA, 17 bp, Arabidopsis thaliana
tttagctctgtctgctt

SEQ ID NO: 166344 - DNA, 17 bp, Arabidopsis thaliana
tttagctctgtctgttt

SEQ ID NO: 166345 - DNA, 17 bp, Arabidopsis thaliana
tttagctgagaacaaat

SEQ ID NO: 166346 - DNA, 17 bp, Arabidopsis thaliana
tttaggaaatctttgat

SEQ ID NO: 166347 - DNA, 17 bp, Arabidopsis thaliana
tttaggaactccttcgt

SEQ ID NO: 166348 - DNA, 17 bp, Arabidopsis thaliana
tttaggagtgaacccaa

SEQ ID NO: 166349 - DNA, 17 bp, Arabidopsis thaliana
tttaggatggccgagtg

SEQ ID NO: 166350 - DNA, 17 bp, Arabidopsis thaliana
tttaggcacttccaaag

SEQ ID NO: 166351 - DNA, 17 bp, Arabidopsis thaliana
tttaggcaggaactaca

SEQ ID NO: 166352 - DNA, 17 bp, Arabidopsis thaliana
tttaggcccgaaaccac

SEQ ID NO: 166353 - DNA, 17 bp, Arabidopsis thaliana
tttaggccctgtttgtt

SEQ ID NO: 166354 - DNA, 17 bp, Arabidopsis thaliana
tttaggcgaagattaga

SEQ ID NO: 166355 - DNA, 17 bp, Arabidopsis thaliana
tttaggcgatgatcagt

SEQ ID NO: 166356 - DNA, 17 bp, Arabidopsis thaliana
tttaggcgggataggcg

SEQ ID NO: 166357 - DNA, 17 bp, Arabidopsis thaliana
tttaggcggtcgtctat

SEQ ID NO: 166358 - DNA, 17 bp, Arabidopsis thaliana
tttaggcttctgaaggt

SEQ ID NO: 166359 - DNA, 17 bp, Arabidopsis thaliana
tttagggattttgctgc

SEQ ID NO: 166360 - DNA, 17 bp, Arabidopsis thaliana
tttagggcacgtctgcc

SEQ ID NO: 166361 - DNA, 17 bp, Arabidopsis thaliana
tttagggcctggatgtc

SEQ ID NO: 166362 - DNA, 17 bp, Arabidopsis thaliana
tttagggcttctgcgtc

SEQ ID NO: 166363 - DNA, 17 bp, Arabidopsis thaliana
tttaggggattcggctt

SEQ ID NO: 166364 - DNA, 17 bp, Arabidopsis thaliana
tttaggtcaaaatttgg

SEQ ID NO: 166365 - DNA, 17 bp, Arabidopsis thaliana
tttaggtcactgggtta

SEQ ID NO: 166366 - DNA, 17 bp, Arabidopsis thaliana
tttaggtccgcgcatgc

SEQ ID NO: 166367 - DNA, 17 bp, Arabidopsis thaliana
tttaggtcgctggttcg

SEQ ID NO: 166368 - DNA, 17 bp, Arabidopsis thaliana
tttaggtgcgattttag

SEQ ID NO: 166369 - DNA, 17 bp, Arabidopsis thaliana
tttaggttctatctggc

SEQ ID NO: 166370 - DNA, 17 bp, Arabidopsis thaliana
tttaggttgattatcgc

SEQ ID NO: 166371 - DNA, 17 bp, Arabidopsis thaliana
tttagtagacactgaga

SEQ ID NO: 166372 - DNA, 17 bp, Arabidopsis thaliana
tttagtaggggcacgct

SEQ ID NO: 166373 - DNA, 17 bp, Arabidopsis thaliana
tttagtcaactcacgac

SEQ ID NO: 166374 - DNA, 17 bp, Arabidopsis thaliana
tttagtcaaggtcatgc

SEQ ID NO: 166375 - DNA, 17 bp, Arabidopsis thaliana
tttagtcacatcctggt

SEQ ID NO: 166376 - DNA, 17 bp, Arabidopsis thaliana
tttagtccatcttattt

SEQ ID NO: 166377 - DNA, 17 bp, Arabidopsis thaliana
tttagtcgcactgtaga

SEQ ID NO: 166378 - DNA, 17 bp, Arabidopsis thaliana
tttagtcgcactgtcga

SEQ ID NO: 166379 - DNA, 17 bp, Arabidopsis thaliana
tttagtcgcatcctgga

SEQ ID NO: 166380 - DNA, 17 bp, Arabidopsis thaliana
tttagtcgcatcctgta

SEQ ID NO: 166381 - DNA, 17 bp, Arabidopsis thaliana
tttagtcgcatctgtag

SEQ ID NO: 166382 - DNA, 17 bp, Arabidopsis thaliana
tttagtcgccgcgtttt

SEQ ID NO: 166383 - DNA, 17 bp, Arabidopsis thaliana
tttagtcgctgtcgccg

SEQ ID NO: 166384 - DNA, 17 bp, Arabidopsis thaliana
tttagtctcggaagcgt

SEQ ID NO: 166385 - DNA, 17 bp, Arabidopsis thaliana
tttagtgctgactcttg

SEQ ID NO: 166386 - DNA, 17 bp, Arabidopsis thaliana
tttagtggccgaagcgt

SEQ ID NO: 166387 - DNA, 17 bp, Arabidopsis thaliana
tttagtgtttaccgtcg

SEQ ID NO: 166388 - DNA, 17 bp, Arabidopsis thaliana
tttagttaccatcggac

SEQ ID NO: 166389 - DNA, 17 bp, Arabidopsis thaliana
tttagttaccgctcagt

SEQ ID NO: 166390 - DNA, 17 bp, Arabidopsis thaliana
tttagttactatcgcac

SEQ ID NO: 166391 - DNA, 17 bp, Arabidopsis thaliana
tttagttaggtcagctc

SEQ ID NO: 166392 - DNA, 17 bp, Arabidopsis thaliana
tttagttcgaccgcgaa

SEQ ID NO: 166393 - DNA, 17 bp, Arabidopsis thaliana
tttagttcggacgtgtg

SEQ ID NO: 166394 - DNA, 17 bp, Arabidopsis thaliana
tttagttgaaccttggg

SEQ ID NO: 166395 - DNA, 17 bp, Arabidopsis thaliana
tttagttgaccttgggt

SEQ ID NO: 166396 - DNA, 17 bp, Arabidopsis thaliana
tttagttgacggaatga

SEQ ID NO: 166397 - DNA, 17 bp, Arabidopsis thaliana
tttagttgacggaatta

SEQ ID NO: 166398 - DNA, 17 bp, Arabidopsis thaliana
tttagttgacggaattg

SEQ ID NO: 166399 - DNA, 17 bp, Arabidopsis thaliana
tttagttgccaccgttg

SEQ ID NO: 166400 - DNA, 17 bp, Arabidopsis thaliana
tttagttgcgggctgac

SEQ ID NO: 166401 - DNA, 17 bp, Arabidopsis thaliana
tttagttgtctgccgac

SEQ ID NO: 166402 - DNA, 17 bp, Arabidopsis thaliana
tttagtttccagaatcc

SEQ ID NO: 166403 - DNA, 17 bp, Arabidopsis thaliana
tttagtttggccgagtg

SEQ ID NO: 166404 - DNA, 17 bp, Arabidopsis thaliana
tttataccagaacctgt

SEQ ID NO: 166405 - DNA, 17 bp, Arabidopsis thaliana
tttataccgccggtgct

SEQ ID NO: 166406 - DNA, 17 bp, Arabidopsis thaliana
tttatacggcttggctt

SEQ ID NO: 166407 - DNA, 17 bp, Arabidopsis thaliana
tttatagaccctatcgg

SEQ ID NO: 166408 - DNA, 17 bp, Arabidopsis thaliana
tttatagattccctgtc

SEQ ID NO: 166409 - DNA, 17 bp, Arabidopsis thaliana
tttatcaactctgtgcg

SEQ ID NO: 166410 - DNA, 17 bp, Arabidopsis thaliana
tttatcaattcgaccct

SEQ ID NO: 166411 - DNA, 17 bp, Arabidopsis thaliana
tttatcacaagtgttgc

SEQ ID NO: 166412 - DNA, 17 bp, Arabidopsis thaliana
tttatcactcggccaac

SEQ ID NO: 166413 - DNA, 17 bp, Arabidopsis thaliana
tttatcagttgggtcgt

SEQ ID NO: 166414 - DNA, 17 bp, Arabidopsis thaliana
tttatcatacctgctgc

SEQ ID NO: 166415 - DNA, 17 bp, Arabidopsis thaliana
tttatcatatctgcttc

SEQ ID NO: 166416 - DNA, 17 bp, Arabidopsis thaliana
tttatccacccgaccgg

SEQ ID NO: 166417 - DNA, 17 bp, Arabidopsis thaliana
tttatcccgcagcttgt

SEQ ID NO: 166418 - DNA, 17 bp, Arabidopsis thaliana
tttatccgcagttgaac

SEQ ID NO: 166419 - DNA, 17 bp, Arabidopsis thaliana
tttatccgcagttgaat

SEQ ID NO: 166420 - DNA, 17 bp, Arabidopsis thaliana
tttatccgcagttgacc

SEQ ID NO: 166421 - DNA, 17 bp, Arabidopsis thaliana
tttatccgctgagcatt

SEQ ID NO: 166422 - DNA, 17 bp, Arabidopsis thaliana
tttatccggctaaatgt

SEQ ID NO: 166423 - DNA, 17 bp, Arabidopsis thaliana
tttatcgaaacaagtgc

SEQ ID NO: 166424 - DNA, 17 bp, Arabidopsis thaliana
tttatcgaaggactgga

SEQ ID NO: 166425 - DNA, 17 bp, Arabidopsis thaliana
tttatcgacgaacacgg

SEQ ID NO: 166426 - DNA, 17 bp, Arabidopsis thaliana
tttatcgcaagaatcta

SEQ ID NO: 166427 - DNA, 17 bp, Arabidopsis thaliana
tttatcgcaagggactg

SEQ ID NO: 166428 - DNA, 17 bp, Arabidopsis thaliana
tttatcgtctctttgcg

SEQ ID NO: 166429 - DNA, 17 bp, Arabidopsis thaliana
tttatcgtggtgcgcca

SEQ ID NO: 166430 - DNA, 17 bp, Arabidopsis thaliana
tttatctaccgaacgat

SEQ ID NO: 166431 - DNA, 17 bp, Arabidopsis thaliana
tttatctacttgatccg

SEQ ID NO: 166432 - DNA, 17 bp, Arabidopsis thaliana
tttatctagatgatgca

SEQ ID NO: 166433 - DNA, 17 bp, Arabidopsis thaliana
tttatctagtggcagtc

SEQ ID NO: 166434 - DNA, 17 bp, Arabidopsis thaliana
tttatctcggttgcttg

SEQ ID NO: 166435 - DNA, 17 bp, Arabidopsis thaliana
tttatctcgtcgggttc

SEQ ID NO: 166436 - DNA, 17 bp, Arabidopsis thaliana
tttatctctgagacagt

SEQ ID NO: 166437 - DNA, 17 bp, Arabidopsis thaliana
tttatctctgtttcgtg

SEQ ID NO: 166438 - DNA, 17 bp, Arabidopsis thaliana
tttatctgctttatccg

SEQ ID NO: 166439 - DNA, 17 bp, Arabidopsis thaliana
tttatctggttaggatt

SEQ ID NO: 166440 - DNA, 17 bp, Arabidopsis thaliana
tttatctggttaggttt

SEQ ID NO: 166441 - DNA, 17 bp, Arabidopsis thaliana
tttatcttctacagcag

SEQ ID NO: 166442 - DNA, 17 bp, Arabidopsis thaliana
tttatcttgtcgctgcg

SEQ ID NO: 166443 - DNA, 17 bp, Arabidopsis thaliana
tttatgacatggtgcca

SEQ ID NO: 166444 - DNA, 17 bp, Arabidopsis thaliana
tttatgagccgacagag

SEQ ID NO: 166445 - DNA, 17 bp, Arabidopsis thaliana
tttatgccagttgtatg

SEQ ID NO: 166446 - DNA, 17 bp, Arabidopsis thaliana
tttatgccatcctaggg

SEQ ID NO: 166447 - DNA, 17 bp, Arabidopsis thaliana
tttatgccccaccatcc

SEQ ID NO: 166448 - DNA, 17 bp, Arabidopsis thaliana
tttatgcctcaccatcc

SEQ ID NO: 166449 - DNA, 17 bp, Arabidopsis thaliana
tttatgctctgaatggt

SEQ ID NO: 166450 - DNA, 17 bp, Arabidopsis thaliana
tttatggaactcacagt

SEQ ID NO: 166451 - DNA, 17 bp, Arabidopsis thaliana
tttatggactaaaccgc

SEQ ID NO: 166452 - DNA, 17 bp, Arabidopsis thaliana
tttatgggacgggttgg

SEQ ID NO: 166453 - DNA, 17 bp, Arabidopsis thaliana
tttatgggccgttcttc

SEQ ID NO: 166454 - DNA, 17 bp, Arabidopsis thaliana
tttatgggtccgccgca

SEQ ID NO: 166455 - DNA, 17 bp, Arabidopsis thaliana
tttatggtccggaatat

SEQ ID NO: 166456 - DNA, 17 bp, Arabidopsis thaliana
tttatgtgacattcgat

SEQ ID NO: 166457 - DNA, 17 bp, Arabidopsis thaliana
tttatgtgtcgtctgtc

SEQ ID NO: 166458 - DNA, 17 bp, Arabidopsis thaliana
tttattagacccgggcg

SEQ ID NO: 166459 - DNA, 17 bp, Arabidopsis thaliana
tttattagcccgccgaa

SEQ ID NO: 166460 - DNA, 17 bp, Arabidopsis thaliana
tttattatgtgacgcac

SEQ ID NO: 166461 - DNA, 17 bp, Arabidopsis thaliana
tttattcaccgcttgct

SEQ ID NO: 166462 - DNA, 17 bp, Arabidopsis thaliana
tttattccgcagacttt

SEQ ID NO: 166463 - DNA, 17 bp, Arabidopsis thaliana
tttattcgcttcttttg

SEQ ID NO: 166464 - DNA, 17 bp, Arabidopsis thaliana
tttattctccacctgca

SEQ ID NO: 166465 - DNA, 17 bp, Arabidopsis thaliana
tttattgccatgtgtta

SEQ ID NO: 166466 - DNA, 17 bp, Arabidopsis thaliana
tttattgccggctaccg

SEQ ID NO: 166467 - DNA, 17 bp, Arabidopsis thaliana
tttattgctaagaagct

SEQ ID NO: 166468 - DNA, 17 bp, Arabidopsis thaliana
tttattgtgcaggaaaa

SEQ ID NO: 166469 - DNA, 17 bp, Arabidopsis thaliana
tttattgtgccaaaccc

SEQ ID NO: 166470 - DNA, 17 bp, Arabidopsis thaliana
tttatttacagcggctg

SEQ ID NO: 166471 - DNA, 17 bp, Arabidopsis thaliana
tttatttacagcggctt

SEQ ID NO: 166472 - DNA, 17 bp, Arabidopsis thaliana
tttatttcatccgtgga

SEQ ID NO: 166473 - DNA, 17 bp, Arabidopsis thaliana
tttatttcgggttcagg

SEQ ID NO: 166474 - DNA, 17 bp, Arabidopsis thaliana
tttatttcttggacaag

SEQ ID NO: 166475 - DNA, 17 bp, Arabidopsis thaliana
tttatttgactagacac

SEQ ID NO: 166476 - DNA, 17 bp, Arabidopsis thaliana
tttatttgcagaatcgg

SEQ ID NO: 166477 - DNA, 17 bp, Arabidopsis thaliana
tttatttggaaccgctt

SEQ ID NO: 166478 - DNA, 17 bp, Arabidopsis thaliana
tttatttgggtcagcaa

SEQ ID NO: 166479 - DNA, 17 bp, Arabidopsis thaliana
tttattttacggaccga

SEQ ID NO: 166480 - DNA, 17 bp, Arabidopsis thaliana
tttattttcccaagcat

SEQ ID NO: 166481 - DNA, 17 bp, Arabidopsis thaliana
tttattttcggcttaga

SEQ ID NO: 166482 - DNA, 17 bp, Arabidopsis thaliana
tttcaaaaactttgtca

SEQ ID NO: 166483 - DNA, 17 bp, Arabidopsis thaliana
tttcaaaactggttcgg

SEQ ID NO: 166484 - DNA, 17 bp, Arabidopsis thaliana
tttcaaaactgtttcgc

SEQ ID NO: 166485 - DNA, 17 bp, Arabidopsis thaliana
tttcaaaagtttgtctt

SEQ ID NO: 166486 - DNA, 17 bp, Arabidopsis thaliana
tttcaaaatttggggtc

SEQ ID NO: 166487 - DNA, 17 bp, Arabidopsis thaliana
tttcaaacagtttgggc

SEQ ID NO: 166488 - DNA, 17 bp, Arabidopsis thaliana
tttcaaacatcgtgagc

SEQ ID NO: 166489 - DNA, 17 bp, Arabidopsis thaliana
tttcaaacctggtctag

SEQ ID NO: 166490 - DNA, 17 bp, Arabidopsis thaliana
tttcaaacgcctgacac

SEQ ID NO: 166491 - DNA, 17 bp, Arabidopsis thaliana
tttcaaactcattcggc

SEQ ID NO: 166492 - DNA, 17 bp, Arabidopsis thaliana
tttcaaactgaaagcct

SEQ ID NO: 166493 - DNA, 17 bp, Arabidopsis thaliana
tttcaaactttgcgatc

SEQ ID NO: 166494 - DNA, 17 bp, Arabidopsis thaliana
tttcaaagattacccgg

SEQ ID NO: 166495 - DNA, 17 bp, Arabidopsis thaliana
tttcaaagcgatgggaa

SEQ ID NO: 166496 - DNA, 17 bp, Arabidopsis thaliana
tttcaaagctgtcagtg

SEQ ID NO: 166497 - DNA, 17 bp, Arabidopsis thaliana
tttcaaaggtccgtctt

SEQ ID NO: 166498 - DNA, 17 bp, Arabidopsis thaliana
tttcaaagtcccaaaag

SEQ ID NO: 166499 - DNA, 17 bp, Arabidopsis thaliana
tttcaaagtccggttag

SEQ ID NO: 166500 - DNA, 17 bp, Arabidopsis thaliana
tttcaaagttgctaact

SEQ ID NO: 166501 - DNA, 17 bp, Arabidopsis thaliana
tttcaaatactcgaacg

SEQ ID NO: 166502 - DNA, 17 bp, Arabidopsis thaliana
tttcaaatacttgaacg

SEQ ID NO: 166503 - DNA, 17 bp, Arabidopsis thaliana
tttcaaatccgggtgcc

SEQ ID NO: 166504 - DNA, 17 bp, Arabidopsis thaliana
tttcaaatcctgaggtc

SEQ ID NO: 166505 - DNA, 17 bp, Arabidopsis thaliana
tttcaaattctcaggat

SEQ ID NO: 166506 - DNA, 17 bp, Arabidopsis thaliana
tttcaacaacttgatgg

SEQ ID NO: 166507 - DNA, 17 bp, Arabidopsis thaliana
tttcaacagttggtgac

SEQ ID NO: 166508 - DNA, 17 bp, Arabidopsis thaliana
tttcaaccaccgggatg

SEQ ID NO: 166509 - DNA, 17 bp, Arabidopsis thaliana
tttcaacccctggtcga

SEQ ID NO: 166510 - DNA, 17 bp, Arabidopsis thaliana
tttcaacctcgatcttg

SEQ ID NO: 166511 - DNA, 17 bp, Arabidopsis thaliana
tttcaacctggctctga

SEQ ID NO: 166512 - DNA, 17 bp, Arabidopsis thaliana
tttcaacgcccagcaca

SEQ ID NO: 166513 - DNA, 17 bp, Arabidopsis thaliana
tttcaacgctttgatgt

SEQ ID NO: 166514 - DNA, 17 bp, Arabidopsis thaliana
tttcaacgtactcggtc

SEQ ID NO: 166515 - DNA, 17 bp, Arabidopsis thaliana
tttcaactccgcattcg

SEQ ID NO: 166516 - DNA, 17 bp, Arabidopsis thaliana
tttcaactggataccga

SEQ ID NO: 166517 - DNA, 17 bp, Arabidopsis thaliana
tttcaagacggtgatcg

SEQ ID NO: 166518 - DNA, 17 bp, Arabidopsis thaliana
tttcaagagttcacggt

SEQ ID NO: 166519 - DNA, 17 bp, Arabidopsis thaliana
tttcaagatcagacgca

SEQ ID NO: 166520 - DNA, 17 bp, Arabidopsis thaliana
tttcaagatccggttgc

SEQ ID NO: 166521 - DNA, 17 bp, Arabidopsis thaliana
tttcaagatctggttgc

SEQ ID NO: 166522 - DNA, 17 bp, Arabidopsis thaliana
tttcaagcagttccggt

SEQ ID NO: 166523 - DNA, 17 bp, Arabidopsis thaliana
tttcaagcccgcaagga

SEQ ID NO: 166524 - DNA, 17 bp, Arabidopsis thaliana
tttcaagcggatctatc

SEQ ID NO: 166525 - DNA, 17 bp, Arabidopsis thaliana
tttcaagcggtccaaag

SEQ ID NO: 166526 - DNA, 17 bp, Arabidopsis thaliana
tttcaaggaatacatca

SEQ ID NO: 166527 - DNA, 17 bp, Arabidopsis thaliana
tttcaaggcccaagacc

SEQ ID NO: 166528 - DNA, 17 bp, Arabidopsis thaliana
tttcaagtatcgcctct

SEQ ID NO: 166529 - DNA, 17 bp, Arabidopsis thaliana
tttcaagtatgcacttc

SEQ ID NO: 166530 - DNA, 17 bp, Arabidopsis thaliana
tttcaagtcaccaaagt

SEQ ID NO: 166531 - DNA, 17 bp, Arabidopsis thaliana
tttcaagtcgtccaaag

SEQ ID NO: 166532 - DNA, 17 bp, Arabidopsis thaliana
tttcaagtcgtctaaag

SEQ ID NO: 166533 - DNA, 17 bp, Arabidopsis thaliana
tttcaagttgggtctaa

SEQ ID NO: 166534 - DNA, 17 bp, Arabidopsis thaliana
tttcaagtttagacccg

SEQ ID NO: 166535 - DNA, 17 bp, Arabidopsis thaliana
tttcaagtttagacgcg

SEQ ID NO: 166536 - DNA, 17 bp, Arabidopsis thaliana
tttcaagtttgcagatt

SEQ ID NO: 166537 - DNA, 17 bp, Arabidopsis thaliana
tttcaataacagtgcag

SEQ ID NO: 166538 - DNA, 17 bp, Arabidopsis thaliana
tttcaatagtttgcttc

SEQ ID NO: 166539 - DNA, 17 bp, Arabidopsis thaliana
tttcaatatttggccca

SEQ ID NO: 166540 - DNA, 17 bp, Arabidopsis thaliana
tttcaatcttgccatga

SEQ ID NO: 166541 - DNA, 17 bp, Arabidopsis thaliana
tttcaatgattctaact

SEQ ID NO: 166542 - DNA, 17 bp, Arabidopsis thaliana
tttcaatgctctttggc

SEQ ID NO: 166543 - DNA, 17 bp, Arabidopsis thaliana
tttcaatgtccgtgctg

SEQ ID NO: 166544 - DNA, 17 bp, Arabidopsis thaliana
tttcaatgtctgttggt

SEQ ID NO: 166545 - DNA, 17 bp, Arabidopsis thaliana
tttcaatgtgtttcgct

SEQ ID NO: 166546 - DNA, 17 bp, Arabidopsis thaliana
tttcaattccgggaccg

SEQ ID NO: 166547 - DNA, 17 bp, Arabidopsis thaliana
tttcaattgttgttcca

SEQ ID NO: 166548 - DNA, 17 bp, Arabidopsis thaliana
tttcaatttcggattag

SEQ ID NO: 166549 - DNA, 17 bp, Arabidopsis thaliana
tttcaatttgttttttg

SEQ ID NO: 166550 - DNA, 17 bp, Arabidopsis thaliana
tttcacaaattctttga

SEQ ID NO: 166551 - DNA, 17 bp, Arabidopsis thaliana
tttcacaactcctacca

SEQ ID NO: 166552 - DNA, 17 bp, Arabidopsis thaliana
tttcacaagttccggaa

SEQ ID NO: 166553 - DNA, 17 bp, Arabidopsis thaliana
tttcacaatccaatgca

SEQ ID NO: 166554 - DNA, 17 bp, Arabidopsis thaliana
tttcacaatcgaggatg

SEQ ID NO: 166555 - DNA, 17 bp, Arabidopsis thaliana
tttcacagattcccacg

SEQ ID NO: 166556 - DNA, 17 bp, Arabidopsis thaliana
tttcacagctttcttga

SEQ ID NO: 166557 - DNA, 17 bp, Arabidopsis thaliana
tttcacagtctgaattc

SEQ ID NO: 166558 - DNA, 17 bp, Arabidopsis thaliana
tttcacagttctttggt

SEQ ID NO: 166559 - DNA, 17 bp, Arabidopsis thaliana
tttcacagttgcgggat

SEQ ID NO: 166560 - DNA, 17 bp, Arabidopsis thaliana
tttcacagttgcggtat

SEQ ID NO: 166561 - DNA, 17 bp, Arabidopsis thaliana
tttcacatacgaatcat

SEQ ID NO: 166562 - DNA, 17 bp, Arabidopsis thaliana
tttcacatcagcgattc

SEQ ID NO: 166563 - DNA, 17 bp, Arabidopsis thaliana
tttcacattcttggttt

SEQ ID NO: 166564 - DNA, 17 bp, Arabidopsis thaliana
tttcaccaactttagcc

SEQ ID NO: 166565 - DNA, 17 bp, Arabidopsis thaliana
tttcaccaatggaaacc

SEQ ID NO: 166566 - DNA, 17 bp, Arabidopsis thaliana
tttcaccactcacttct

SEQ ID NO: 166567 - DNA, 17 bp, Arabidopsis thaliana
tttcaccacttggctac

SEQ ID NO: 166568 - DNA, 17 bp, Arabidopsis thaliana
tttcaccagacttgttt

SEQ ID NO: 166569 - DNA, 17 bp, Arabidopsis thaliana
tttcaccagtgcgcttt

SEQ ID NO: 166570 - DNA, 17 bp, Arabidopsis thaliana
tttcaccatgaactaaa

SEQ ID NO: 166571 - DNA, 17 bp, Arabidopsis thaliana
tttcaccatttgccttt

SEQ ID NO: 166572 - DNA, 17 bp, Arabidopsis thaliana
tttcacccccggacttt

SEQ ID NO: 166573 - DNA, 17 bp, Arabidopsis thaliana
tttcacccgtggtatac

SEQ ID NO: 166574 - DNA, 17 bp, Arabidopsis thaliana
tttcaccggcggcacaa

SEQ ID NO: 166575 - DNA, 17 bp, Arabidopsis thaliana
tttcaccggcttacacg

SEQ ID NO: 166576 - DNA, 17 bp, Arabidopsis thaliana
tttcaccgggtcccaat

SEQ ID NO: 166577 - DNA, 17 bp, Arabidopsis thaliana
tttcacctctctttctg

SEQ ID NO: 166578 - DNA, 17 bp, Arabidopsis thaliana
tttcacgacgcgagcag

SEQ ID NO: 166579 - DNA, 17 bp, Arabidopsis thaliana
tttcacgatacaaggtt

SEQ ID NO: 166580 - DNA, 17 bp, Arabidopsis thaliana
tttcacgcaggattttt

SEQ ID NO: 166581 - DNA, 17 bp, Arabidopsis thaliana
tttcacgcatatgccat

SEQ ID NO: 166582 - DNA, 17 bp, Arabidopsis thaliana
tttcacgccgattctgt

SEQ ID NO: 166583 - DNA, 17 bp, Arabidopsis thaliana
tttcacggcatgtccga

SEQ ID NO: 166584 - DNA, 17 bp, Arabidopsis thaliana
tttcacggtgtagccaa

SEQ ID NO: 166585 - DNA, 17 bp, Arabidopsis thaliana
tttcacggttcacttca

SEQ ID NO: 166586 - DNA, 17 bp, Arabidopsis thaliana
tttcacgtatgcctgct

SEQ ID NO: 166587 - DNA, 17 bp, Arabidopsis thaliana
tttcacgtcactcgaag

SEQ ID NO: 166588 - DNA, 17 bp, Arabidopsis thaliana
tttcacgtctgcctggg

SEQ ID NO: 166589 - DNA, 17 bp, Arabidopsis thaliana
tttcacgttgacgcgat

SEQ ID NO: 166590 - DNA, 17 bp, Arabidopsis thaliana
tttcacgttggaccgtt

SEQ ID NO: 166591 - DNA, 17 bp, Arabidopsis thaliana
tttcactaggcttccaa

SEQ ID NO: 166592 - DNA, 17 bp, Arabidopsis thaliana
tttcactatcttcgcgg

SEQ ID NO: 166593 - DNA, 17 bp, Arabidopsis thaliana
tttcactcaggtttaca

SEQ ID NO: 166594 - DNA, 17 bp, Arabidopsis thaliana
tttcactccaatcagac

SEQ ID NO: 166595 - DNA, 17 bp, Arabidopsis thaliana
tttcactccttactcgg

SEQ ID NO: 166596 - DNA, 17 bp, Arabidopsis thaliana
tttcactcgaccaacag

SEQ ID NO: 166597 - DNA, 17 bp, Arabidopsis thaliana
tttcactcgacctctca

SEQ ID NO: 166598 - DNA, 17 bp, Arabidopsis thaliana
tttcactcgtaacgggc

SEQ ID NO: 166599 - DNA, 17 bp, Arabidopsis thaliana
tttcactctttctgggc

SEQ ID NO: 166600 - DNA, 17 bp, Arabidopsis thaliana
tttcactgaacggggtt

SEQ ID NO: 166601 - DNA, 17 bp, Arabidopsis thaliana
tttcactgcctcttccc

SEQ ID NO: 166602 - DNA, 17 bp, Arabidopsis thaliana
tttcactgctctatctg

SEQ ID NO: 166603 - DNA, 17 bp, Arabidopsis thaliana
tttcactgctctcagag

SEQ ID NO: 166604 - DNA, 17 bp, Arabidopsis thaliana
tttcactgctgcgccaa

SEQ ID NO: 166605 - DNA, 17 bp, Arabidopsis thaliana
tttcactgggtactggt

SEQ ID NO: 166606 - DNA, 17 bp, Arabidopsis thaliana
tttcactgtccctcttt

SEQ ID NO: 166607 - DNA, 17 bp, Arabidopsis thaliana
tttcactgtgacggctt

SEQ ID NO: 166608 - DNA, 17 bp, Arabidopsis thaliana
tttcacttcgctgtgct

SEQ ID NO: 166609 - DNA, 17 bp, Arabidopsis thaliana
tttcactttgctgtgct

SEQ ID NO: 166610 - DNA, 17 bp, Arabidopsis thaliana
tttcactttgttgtgct

SEQ ID NO: 166611 - DNA, 17 bp, Arabidopsis thaliana
tttcagaaactctgaga

SEQ ID NO: 166612 - DNA, 17 bp, Arabidopsis thaliana
tttcagaaatgcatgcg

SEQ ID NO: 166613 - DNA, 17 bp, Arabidopsis thaliana
tttcagaaatgtcacag

SEQ ID NO: 166614 - DNA, 17 bp, Arabidopsis thaliana
tttcagaacatagggca

SEQ ID NO: 166615 - DNA, 17 bp, Arabidopsis thaliana
tttcagaatctggtcca

SEQ ID NO: 166616 - DNA, 17 bp, Arabidopsis thaliana
tttcagacgcaaggaga

SEQ ID NO: 166617 - DNA, 17 bp, Arabidopsis thaliana
tttcagacggatccagt

SEQ ID NO: 166618 - DNA, 17 bp, Arabidopsis thaliana
tttcagactcttcaatt

SEQ ID NO: 166619 - DNA, 17 bp, Arabidopsis thaliana
tttcagactcttcacgg

SEQ ID NO: 166620 - DNA, 17 bp, Arabidopsis thaliana
tttcagactttgtcctc

SEQ ID NO: 166621 - DNA, 17 bp, Arabidopsis thaliana
tttcagagacatatgga

SEQ ID NO: 166622 - DNA, 17 bp, Arabidopsis thaliana
tttcagagactgcgatg

SEQ ID NO: 166623 - DNA, 17 bp, Arabidopsis thaliana
tttcagagcctaggagt

SEQ ID NO: 166624 - DNA, 17 bp, Arabidopsis thaliana
tttcagagtcggctgat

SEQ ID NO: 166625 - DNA, 17 bp, Arabidopsis thaliana
tttcagagtggacttct

SEQ ID NO: 166626 - DNA, 17 bp, Arabidopsis thaliana
tttcagagttctcctct

SEQ ID NO: 166627 - DNA, 17 bp, Arabidopsis thaliana
tttcagagttcttccag

SEQ ID NO: 166628 - DNA, 17 bp, Arabidopsis thaliana
tttcagatcgtcgacct

SEQ ID NO: 166629 - DNA, 17 bp, Arabidopsis thaliana
tttcagattctttggcc

SEQ ID NO: 166630 - DNA, 17 bp, Arabidopsis thaliana
tttcagattgcgttgct

SEQ ID NO: 166631 - DNA, 17 bp, Arabidopsis thaliana
tttcagattttggtttg

SEQ ID NO: 166632 - DNA, 17 bp, Arabidopsis thaliana
tttcagcacgtaccgca

SEQ ID NO: 166633 - DNA, 17 bp, Arabidopsis thaliana
tttcagccagcctaacc

SEQ ID NO: 166634 - DNA, 17 bp, Arabidopsis thaliana
tttcagccagcctaagc

SEQ ID NO: 166635 - DNA, 17 bp, Arabidopsis thaliana
tttcagccctttgtcgc

SEQ ID NO: 166636 - DNA, 17 bp, Arabidopsis thaliana
tttcagcctttgcgcag

SEQ ID NO: 166637 - DNA, 17 bp, Arabidopsis thaliana
tttcagcgacggaccgg

SEQ ID NO: 166638 - DNA, 17 bp, Arabidopsis thaliana
tttcagcgctgattccg

SEQ ID NO: 166639 - DNA, 17 bp, Arabidopsis thaliana
tttcagcggatgatttg

SEQ ID NO: 166640 - DNA, 17 bp, Arabidopsis thaliana
tttcagcggctattagg

SEQ ID NO: 166641 - DNA, 17 bp, Arabidopsis thaliana
tttcagcgtaagcttct

SEQ ID NO: 166642 - DNA, 17 bp, Arabidopsis thaliana
tttcagcgtctatgaaa

SEQ ID NO: 166643 - DNA, 17 bp, Arabidopsis thaliana
tttcagcgtctatggaa

SEQ ID NO: 166644 - DNA, 17 bp, Arabidopsis thaliana
tttcagcgtctgccaat

SEQ ID NO: 166645 - DNA, 17 bp, Arabidopsis thaliana
tttcagcgtcttggcac

SEQ ID NO: 166646 - DNA, 17 bp, Arabidopsis thaliana
tttcagctaacgttgca

SEQ ID NO: 166647 - DNA, 17 bp, Arabidopsis thaliana
tttcagctctgggtcct

SEQ ID NO: 166648 - DNA, 17 bp, Arabidopsis thaliana
tttcagctgtagcagca

SEQ ID NO: 166649 - DNA, 17 bp, Arabidopsis thaliana
tttcagcttcggggttt

SEQ ID NO: 166650 - DNA, 17 bp, Arabidopsis thaliana
tttcagcttggagagct

SEQ ID NO: 166651 - DNA, 17 bp, Arabidopsis thaliana
tttcagctttcggttta

SEQ ID NO: 166652 - DNA, 17 bp, Arabidopsis thaliana
tttcaggaaatatgaac

SEQ ID NO: 166653 - DNA, 17 bp, Arabidopsis thaliana
tttcaggaaatgggcac

SEQ ID NO: 166654 - DNA, 17 bp, Arabidopsis thaliana
tttcaggaatgcagatt

SEQ ID NO: 166655 - DNA, 17 bp, Arabidopsis thaliana
tttcaggaccgattcgt

SEQ ID NO: 166656 - DNA, 17 bp, Arabidopsis thaliana
tttcaggatggcgaggc

SEQ ID NO: 166657 - DNA, 17 bp, Arabidopsis thaliana
tttcaggattatgggcc

SEQ ID NO: 166658 - DNA, 17 bp, Arabidopsis thaliana
tttcaggattcatgcac

SEQ ID NO: 166659 - DNA, 17 bp, Arabidopsis thaliana
tttcaggcctagagaaa

SEQ ID NO: 166660 - DNA, 17 bp, Arabidopsis thaliana
tttcaggcctcaacttg

SEQ ID NO: 166661 - DNA, 17 bp, Arabidopsis thaliana
tttcaggcttcttcggg

SEQ ID NO: 166662 - DNA, 17 bp, Arabidopsis thaliana
tttcaggctttgttcca

SEQ ID NO: 166663 - DNA, 17 bp, Arabidopsis thaliana
tttcagggaatgctcga

SEQ ID NO: 166664 - DNA, 17 bp, Arabidopsis thaliana
tttcagggaccaggtgt

SEQ ID NO: 166665 - DNA, 17 bp, Arabidopsis thaliana
tttcagggaggatcgaa

SEQ ID NO: 166666 - DNA, 17 bp, Arabidopsis thaliana
tttcagggtggacttct

SEQ ID NO: 166667 - DNA, 17 bp, Arabidopsis thaliana
tttcagggtggtttgca

SEQ ID NO: 166668 - DNA, 17 bp, Arabidopsis thaliana
tttcaggtaccttgcaa

SEQ ID NO: 166669 - DNA, 17 bp, Arabidopsis thaliana
tttcaggtccaagaccg

SEQ ID NO: 166670 - DNA, 17 bp, Arabidopsis thaliana
tttcaggtctattttgc

SEQ ID NO: 166671 - DNA, 17 bp, Arabidopsis thaliana
tttcaggtctcggtggg

SEQ ID NO: 166672 - DNA, 17 bp, Arabidopsis thaliana
tttcaggtctgggggac

SEQ ID NO: 166673 - DNA, 17 bp, Arabidopsis thaliana
tttcaggtggggagttt

SEQ ID NO: 166674 - DNA, 17 bp, Arabidopsis thaliana
tttcaggtggtgcatgg

SEQ ID NO: 166675 - DNA, 17 bp, Arabidopsis thaliana
tttcaggtttcgaagat

SEQ ID NO: 166676 - DNA, 17 bp, Arabidopsis thaliana
tttcagtatcacttgac

SEQ ID NO: 166677 - DNA, 17 bp, Arabidopsis thaliana
tttcagtcacaaggagc

SEQ ID NO: 166678 - DNA, 17 bp, Arabidopsis thaliana
tttcagtcgattggagc

SEQ ID NO: 166679 - DNA, 17 bp, Arabidopsis thaliana
tttcagtcgccagcgac

SEQ ID NO: 166680 - DNA, 17 bp, Arabidopsis thaliana
tttcagtcgtacgtcgc

SEQ ID NO: 166681 - DNA, 17 bp, Arabidopsis thaliana
tttcagtctgggaagcg

SEQ ID NO: 166682 - DNA, 17 bp, Arabidopsis thaliana
tttcagtgcatttctac

SEQ ID NO: 166683 - DNA, 17 bp, Arabidopsis thaliana
tttcagtgcggtacagt

SEQ ID NO: 166684 - DNA, 17 bp, Arabidopsis thaliana
tttcagtgcggttttgt

SEQ ID NO: 166685 - DNA, 17 bp, Arabidopsis thaliana
tttcagttaaccacagc

SEQ ID NO: 166686 - DNA, 17 bp, Arabidopsis thaliana
tttcagtttgcagagac

SEQ ID NO: 166687 - DNA, 17 bp, Arabidopsis thaliana
tttcataacaggaacac

SEQ ID NO: 166688 - DNA, 17 bp, Arabidopsis thaliana
tttcataactttgatct

SEQ ID NO: 166689 - DNA, 17 bp, Arabidopsis thaliana
tttcatactcgctgcta

SEQ ID NO: 166690 - DNA, 17 bp, Arabidopsis thaliana
tttcatattttcggtcc

SEQ ID NO: 166691 - DNA, 17 bp, Arabidopsis thaliana
tttcatcacagcacgat

SEQ ID NO: 166692 - DNA, 17 bp, Arabidopsis thaliana
tttcatccacgatcaaa

SEQ ID NO: 166693 - DNA, 17 bp, Arabidopsis thaliana
tttcatccacgatcgta

SEQ ID NO: 166694 - DNA, 17 bp, Arabidopsis thaliana
tttcatccacgatgata

SEQ ID NO: 166695 - DNA, 17 bp, Arabidopsis thaliana
tttcatccactgcggtg

SEQ ID NO: 166696 - DNA, 17 bp, Arabidopsis thaliana
tttcatcccaaagtcat

SEQ ID NO: 166697 - DNA, 17 bp, Arabidopsis thaliana
tttcatcccacagcgtg

SEQ ID NO: 166698 - DNA, 17 bp, Arabidopsis thaliana
tttcatcccaggggtat

SEQ ID NO: 166699 - DNA, 17 bp, Arabidopsis thaliana
tttcatccctggcacta

SEQ ID NO: 166700 - DNA, 17 bp, Arabidopsis thaliana
tttcatcctgtgagtcc

SEQ ID NO: 166701 - DNA, 17 bp, Arabidopsis thaliana
tttcatcgaacaccttt

SEQ ID NO: 166702 - DNA, 17 bp, Arabidopsis thaliana
tttcatcgcccaaagaa

SEQ ID NO: 166703 - DNA, 17 bp, Arabidopsis thaliana
tttcatcgtctttgccc

SEQ ID NO: 166704 - DNA, 17 bp, Arabidopsis thaliana
tttcatcgtgatgggga

SEQ ID NO: 166705 - DNA, 17 bp, Arabidopsis thaliana
tttcatcgtgtagccaa

SEQ ID NO: 166706 - DNA, 17 bp, Arabidopsis thaliana
tttcatcgtttcatcca

SEQ ID NO: 166707 - DNA, 17 bp, Arabidopsis thaliana
tttcatctaccatattg

SEQ ID NO: 166708 - DNA, 17 bp, Arabidopsis thaliana
tttcatctaccgtttgc

SEQ ID NO: 166709 - DNA, 17 bp, Arabidopsis thaliana
tttcatctaggcgaaat

SEQ ID NO: 166710 - DNA, 17 bp, Arabidopsis thaliana
tttcatctcaaccgccc

SEQ ID NO: 166711 - DNA, 17 bp, Arabidopsis thaliana
tttcatctcaggcgtcg

SEQ ID NO: 166712 - DNA, 17 bp, Arabidopsis thaliana
tttcatctccatgtcgc

SEQ ID NO: 166713 - DNA, 17 bp, Arabidopsis thaliana
tttcatctctgccgcaa

SEQ ID NO: 166714 - DNA, 17 bp, Arabidopsis thaliana
tttcatctctgccgcag

SEQ ID NO: 166715 - DNA, 17 bp, Arabidopsis thaliana
tttcatctctgccgcat

SEQ ID NO: 166716 - DNA, 17 bp, Arabidopsis thaliana
tttcatctctgctgcat

SEQ ID NO: 166717 - DNA, 17 bp, Arabidopsis thaliana
tttcatctcttccgcga

SEQ ID NO: 166718 - DNA, 17 bp, Arabidopsis thaliana
tttcatctcttgctttt

SEQ ID NO: 166719 - DNA, 17 bp, Arabidopsis thaliana
tttcatcttagtgggac

SEQ ID NO: 166720 - DNA, 17 bp, Arabidopsis thaliana
tttcatcttcagaaaac

SEQ ID NO: 166721 - DNA, 17 bp, Arabidopsis thaliana
tttcatcttcagaaacc

SEQ ID NO: 166722 - DNA, 17 bp, Arabidopsis thaliana
tttcatcttctgtaact

SEQ ID NO: 166723 - DNA, 17 bp, Arabidopsis thaliana
tttcatctttagaaacc

SEQ ID NO: 166724 - DNA, 17 bp, Arabidopsis thaliana
tttcatctttgccgcat

SEQ ID NO: 166725 - DNA, 17 bp, Arabidopsis thaliana
tttcatgctaggatcag

SEQ ID NO: 166726 - DNA, 17 bp, Arabidopsis thaliana
tttcatggaccgattca

SEQ ID NO: 166727 - DNA, 17 bp, Arabidopsis thaliana
tttcatggataatcagg

SEQ ID NO: 166728 - DNA, 17 bp, Arabidopsis thaliana
tttcatggtgcacttga

SEQ ID NO: 166729 - DNA, 17 bp, Arabidopsis thaliana
tttcatggtgtagccaa

SEQ ID NO: 166730 - DNA, 17 bp, Arabidopsis thaliana
tttcatggtgtagccga

SEQ ID NO: 166731 - DNA, 17 bp, Arabidopsis thaliana
tttcattatctgcgatt

SEQ ID NO: 166732 - DNA, 17 bp, Arabidopsis thaliana
tttcattcacctgttta

SEQ ID NO: 166733 - DNA, 17 bp, Arabidopsis thaliana
tttcattcccgagttgg

SEQ ID NO: 166734 - DNA, 17 bp, Arabidopsis thaliana
tttcattcgagcatatc

SEQ ID NO: 166735 - DNA, 17 bp, Arabidopsis thaliana
tttcattctaactgtgc

SEQ ID NO: 166736 - DNA, 17 bp, Arabidopsis thaliana
tttcattctctcagatt

SEQ ID NO: 166737 - DNA, 17 bp, Arabidopsis thaliana
tttcattgactttttgt

SEQ ID NO: 166738 - DNA, 17 bp, Arabidopsis thaliana
tttcattgcggcggagg

SEQ ID NO: 166739 - DNA, 17 bp, Arabidopsis thaliana
tttcattgctcagatca

SEQ ID NO: 166740 - DNA, 17 bp, Arabidopsis thaliana
tttcattgtttgtcagg

SEQ ID NO: 166741 - DNA, 17 bp, Arabidopsis thaliana
tttcatttccaccgccg

SEQ ID NO: 166742 - DNA, 17 bp, Arabidopsis thaliana
tttcatttcttagccat

SEQ ID NO: 166743 - DNA, 17 bp, Arabidopsis thaliana
tttcatttgcggacacg

SEQ ID NO: 166744 - DNA, 17 bp, Arabidopsis thaliana
tttcatttgcggacatg

SEQ ID NO: 166745 - DNA, 17 bp, Arabidopsis thaliana
tttcatttgctgtgctc

SEQ ID NO: 166746 - DNA, 17 bp, Arabidopsis thaliana
tttcatttggttttggg

SEQ ID NO: 166747 - DNA, 17 bp, Arabidopsis thaliana
tttcattttcaatggtc

SEQ ID NO: 166748 - DNA, 17 bp, Arabidopsis thaliana
tttcattttcgtgattt

SEQ ID NO: 166749 - DNA, 17 bp, Arabidopsis thaliana
tttcattttctagaggc

SEQ ID NO: 166750 - DNA, 17 bp, Arabidopsis thaliana
tttcattttgacaaacc

SEQ ID NO: 166751 - DNA, 17 bp, Arabidopsis thaliana
tttcattttttgaaagt

SEQ ID NO: 166752 - DNA, 17 bp, Arabidopsis thaliana
tttcattttttgctctc

SEQ ID NO: 166753 - DNA, 17 bp, Arabidopsis thaliana
tttccaaaacagcctcg

SEQ ID NO: 166754 - DNA, 17 bp, Arabidopsis thaliana
tttccaaaactgttgtg

SEQ ID NO: 166755 - DNA, 17 bp, Arabidopsis thaliana
tttccaaaagattcaca

SEQ ID NO: 166756 - DNA, 17 bp, Arabidopsis thaliana
tttccaaacggaagtct

SEQ ID NO: 166757 - DNA, 17 bp, Arabidopsis thaliana
tttccaaacttaagcga

SEQ ID NO: 166758 - DNA, 17 bp, Arabidopsis thaliana
tttccaaaggcccgcca

SEQ ID NO: 166759 - DNA, 17 bp, Arabidopsis thaliana
tttccaaagttgtgtga

SEQ ID NO: 166760 - DNA, 17 bp, Arabidopsis thaliana
tttccaaatttgtggca

SEQ ID NO: 166761 - DNA, 17 bp, Arabidopsis thaliana
tttccaaattttgggtg

SEQ ID NO: 166762 - DNA, 17 bp, Arabidopsis thaliana
tttccaaccaagcttct

SEQ ID NO: 166763 - DNA, 17 bp, Arabidopsis thaliana
tttccaacccatcccta

SEQ ID NO: 166764 - DNA, 17 bp, Arabidopsis thaliana
tttccaaccggtttcgc

SEQ ID NO: 166765 - DNA, 17 bp, Arabidopsis thaliana
tttccaactaatgccag

SEQ ID NO: 166766 - DNA, 17 bp, Arabidopsis thaliana
tttccaactttcggtac

SEQ ID NO: 166767 - DNA, 17 bp, Arabidopsis thaliana
tttccaagaccatatgc

SEQ ID NO: 166768 - DNA, 17 bp, Arabidopsis thaliana
tttccaagcaggactgt

SEQ ID NO: 166769 - DNA, 17 bp, Arabidopsis thaliana
tttccaaggatgacttg

SEQ ID NO: 166770 - DNA, 17 bp, Arabidopsis thaliana
tttccaaggttcaggca

SEQ ID NO: 166771 - DNA, 17 bp, Arabidopsis thaliana
tttccaaggttgagaca

SEQ ID NO: 166772 - DNA, 17 bp, Arabidopsis thaliana
tttccaaggtttcatgt

SEQ ID NO: 166773 - DNA, 17 bp, Arabidopsis thaliana
tttccaagtccggatcg

SEQ ID NO: 166774 - DNA, 17 bp, Arabidopsis thaliana
tttccaagtgtacgaat

SEQ ID NO: 166775 - DNA, 17 bp, Arabidopsis thaliana
tttccaatcaggcgaag

SEQ ID NO: 166776 - DNA, 17 bp, Arabidopsis thaliana
tttccaatcgaatggtc

SEQ ID NO: 166777 - DNA, 17 bp, Arabidopsis thaliana
tttccaatgatctggca

SEQ ID NO: 166778 - DNA, 17 bp, Arabidopsis thaliana
tttccaatgccagaact

SEQ ID NO: 166779 - DNA, 17 bp, Arabidopsis thaliana
tttccacagaccattta

SEQ ID NO: 166780 - DNA, 17 bp, Arabidopsis thaliana
tttccacagagatttta

SEQ ID NO: 166781 - DNA, 17 bp, Arabidopsis thaliana
tttccacatttttccac

SEQ ID NO: 166782 - DNA, 17 bp, Arabidopsis thaliana
tttccaccactggagat

SEQ ID NO: 166783 - DNA, 17 bp, Arabidopsis thaliana
tttccaccagtttgccc

SEQ ID NO: 166784 - DNA, 17 bp, Arabidopsis thaliana
tttccacccgacctacc

SEQ ID NO: 166785 - DNA, 17 bp, Arabidopsis thaliana
tttccacccgacctact

SEQ ID NO: 166786 - DNA, 17 bp, Arabidopsis thaliana
tttccacctttatgatc

SEQ ID NO: 166787 - DNA, 17 bp, Arabidopsis thaliana
tttccacgtcaattgcg

SEQ ID NO: 166788 - DNA, 17 bp, Arabidopsis thaliana
tttccacgtcaggtgcg

SEQ ID NO: 166789 - DNA, 17 bp, Arabidopsis thaliana
tttccacgtccagagat

SEQ ID NO: 166790 - DNA, 17 bp, Arabidopsis thaliana
tttccactaagcagatt

SEQ ID NO: 166791 - DNA, 17 bp, Arabidopsis thaliana
tttccactaagcagttt

SEQ ID NO: 166792 - DNA, 17 bp, Arabidopsis thaliana
tttccactgaaccacct

SEQ ID NO: 166793 - DNA, 17 bp, Arabidopsis thaliana
tttccactgacttttgg

SEQ ID NO: 166794 - DNA, 17 bp, Arabidopsis thaliana
tttccactgacttttta

SEQ ID NO: 166795 - DNA, 17 bp, Arabidopsis thaliana
tttccactgactttttg

SEQ ID NO: 166796 - DNA, 17 bp, Arabidopsis thaliana
tttccactttcggctcc

SEQ ID NO: 166797 - DNA, 17 bp, Arabidopsis thaliana
tttccactttttacggc

SEQ ID NO: 166798 - DNA, 17 bp, Arabidopsis thaliana
tttccactttttacggg

SEQ ID NO: 166799 - DNA, 17 bp, Arabidopsis thaliana
tttccagaaaattctac

SEQ ID NO: 166800 - DNA, 17 bp, Arabidopsis thaliana
tttccagaccgtttgct

SEQ ID NO: 166801 - DNA, 17 bp, Arabidopsis thaliana
tttccagagaggatcga

SEQ ID NO: 166802 - DNA, 17 bp, Arabidopsis thaliana
tttccagagtcgtacga

SEQ ID NO: 166803 - DNA, 17 bp, Arabidopsis thaliana
tttccagatatcgcgaa

SEQ ID NO: 166804 - DNA, 17 bp, Arabidopsis thaliana
tttccagcaacaagcgc

SEQ ID NO: 166805 - DNA, 17 bp, Arabidopsis thaliana
tttccagcaacgagcgc

SEQ ID NO: 166806 - DNA, 17 bp, Arabidopsis thaliana
tttccagccgattgacg

SEQ ID NO: 166807 - DNA, 17 bp, Arabidopsis thaliana
tttccagcgagctatcg

SEQ ID NO: 166808 - DNA, 17 bp, Arabidopsis thaliana
tttccagcgtgtttcgt

SEQ ID NO: 166809 - DNA, 17 bp, Arabidopsis thaliana
tttccagctcatctgct

SEQ ID NO: 166810 - DNA, 17 bp, Arabidopsis thaliana
tttccaggagtggagcc

SEQ ID NO: 166811 - DNA, 17 bp, Arabidopsis thaliana
tttccaggatttgtggt

SEQ ID NO: 166812 - DNA, 17 bp, Arabidopsis thaliana
tttccaggcccgaaacc

SEQ ID NO: 166813 - DNA, 17 bp, Arabidopsis thaliana
tttccagggaaaccgga

SEQ ID NO: 166814 - DNA, 17 bp, Arabidopsis thaliana
tttccagggctctttct

SEQ ID NO: 166815 - DNA, 17 bp, Arabidopsis thaliana
tttccaggtcatcgcag

SEQ ID NO: 166816 - DNA, 17 bp, Arabidopsis thaliana
tttccaggttgtcgctt

SEQ ID NO: 166817 - DNA, 17 bp, Arabidopsis thaliana
tttccagtcgagtctca

SEQ ID NO: 166818 - DNA, 17 bp, Arabidopsis thaliana
tttccagtgattcgggc

SEQ ID NO: 166819 - DNA, 17 bp, Arabidopsis thaliana
tttccagtgctagaccg

SEQ ID NO: 166820 - DNA, 17 bp, Arabidopsis thaliana
tttccagttcttcggtt

SEQ ID NO: 166821 - DNA, 17 bp, Arabidopsis thaliana
tttccagtttgtcattt

SEQ ID NO: 166822 - DNA, 17 bp, Arabidopsis thaliana
tttccatacctcttgac

SEQ ID NO: 166823 - DNA, 17 bp, Arabidopsis thaliana
tttccatacctctttga

SEQ ID NO: 166824 - DNA, 17 bp, Arabidopsis thaliana
tttccatacgcgagtca

SEQ ID NO: 166825 - DNA, 17 bp, Arabidopsis thaliana
tttccatatggttgatt

SEQ ID NO: 166826 - DNA, 17 bp, Arabidopsis thaliana
tttccatccacgaatgc

SEQ ID NO: 166827 - DNA, 17 bp, Arabidopsis thaliana
tttccatccattgcaga

SEQ ID NO: 166828 - DNA, 17 bp, Arabidopsis thaliana
tttccatcctctttgcc

SEQ ID NO: 166829 - DNA, 17 bp, Arabidopsis thaliana
tttccatcgaccgccaa

SEQ ID NO: 166830 - DNA, 17 bp, Arabidopsis thaliana
tttccatcgagtgaccg

SEQ ID NO: 166831 - DNA, 17 bp, Arabidopsis thaliana
tttccatcgccatcttt

SEQ ID NO: 166832 - DNA, 17 bp, Arabidopsis thaliana
tttccatcgccgctgct

SEQ ID NO: 166833 - DNA, 17 bp, Arabidopsis thaliana
tttccatcgctagataa

SEQ ID NO: 166834 - DNA, 17 bp, Arabidopsis thaliana
tttccatctatgtggtc

SEQ ID NO: 166835 - DNA, 17 bp, Arabidopsis thaliana
tttccatcttgcaggtt

SEQ ID NO: 166836 - DNA, 17 bp, Arabidopsis thaliana
tttccatctttatccag

SEQ ID NO: 166837 - DNA, 17 bp, Arabidopsis thaliana
tttccatgactttccat

SEQ ID NO: 166838 - DNA, 17 bp, Arabidopsis thaliana
tttccatgagattcaca

SEQ ID NO: 166839 - DNA, 17 bp, Arabidopsis thaliana
tttccatgattggggct

SEQ ID NO: 166840 - DNA, 17 bp, Arabidopsis thaliana
tttccatgcggcagatg

SEQ ID NO: 166841 - DNA, 17 bp, Arabidopsis thaliana
tttccatgctaactatg

SEQ ID NO: 166842 - DNA, 17 bp, Arabidopsis thaliana
tttccatgctacaaact

SEQ ID NO: 166843 - DNA, 17 bp, Arabidopsis thaliana
tttccatgctttctccg

SEQ ID NO: 166844 - DNA, 17 bp, Arabidopsis thaliana
tttccatggctcaacaa

SEQ ID NO: 166845 - DNA, 17 bp, Arabidopsis thaliana
tttccatgggaccaaac

SEQ ID NO: 166846 - DNA, 17 bp, Arabidopsis thaliana
tttccatggggacacag

SEQ ID NO: 166847 - DNA, 17 bp, Arabidopsis thaliana
tttccattaactttttg

SEQ ID NO: 166848 - DNA, 17 bp, Arabidopsis thaliana
tttccattatgtggaga

SEQ ID NO: 166849 - DNA, 17 bp, Arabidopsis thaliana
tttccattgacgttttg

SEQ ID NO: 166850 - DNA, 17 bp, Arabidopsis thaliana
tttccattgactttttg

SEQ ID NO: 166851 - DNA, 17 bp, Arabidopsis thaliana
tttccattgactttttt

SEQ ID NO: 166852 - DNA, 17 bp, Arabidopsis thaliana
tttccattgtccagctt

SEQ ID NO: 166853 - DNA, 17 bp, Arabidopsis thaliana
tttccattgtggactcg

SEQ ID NO: 166854 - DNA, 17 bp, Arabidopsis thaliana
tttccatttccaatgca

SEQ ID NO: 166855 - DNA, 17 bp, Arabidopsis thaliana
tttccatttccatttct

SEQ ID NO: 166856 - DNA, 17 bp, Arabidopsis thaliana
tttccatttccgaccat

SEQ ID NO: 166857 - DNA, 17 bp, Arabidopsis thaliana
tttccatttctaccgac

SEQ ID NO: 166858 - DNA, 17 bp, Arabidopsis thaliana
tttccatttgtttgtcg

SEQ ID NO: 166859 - DNA, 17 bp, Arabidopsis thaliana
tttcccaaacatgttag

SEQ ID NO: 166860 - DNA, 17 bp, Arabidopsis thaliana
tttcccaaacgtttgtg

SEQ ID NO: 166861 - DNA, 17 bp, Arabidopsis thaliana
tttcccaaaggacaagc

SEQ ID NO: 166862 - DNA, 17 bp, Arabidopsis thaliana
tttcccaaattcgccac

SEQ ID NO: 166863 - DNA, 17 bp, Arabidopsis thaliana
tttcccaaccatcctgt

SEQ ID NO: 166864 - DNA, 17 bp, Arabidopsis thaliana
tttcccaaccgaatgcc

SEQ ID NO: 166865 - DNA, 17 bp, Arabidopsis thaliana
tttcccaaccgaatggc

SEQ ID NO: 166866 - DNA, 17 bp, Arabidopsis thaliana
tttcccaattgactgat

SEQ ID NO: 166867 - DNA, 17 bp, Arabidopsis thaliana
tttcccacaaacttgat

SEQ ID NO: 166868 - DNA, 17 bp, Arabidopsis thaliana
tttcccacaagcgttta

SEQ ID NO: 166869 - DNA, 17 bp, Arabidopsis thaliana
tttcccaccctggaaac

SEQ ID NO: 166870 - DNA, 17 bp, Arabidopsis thaliana
tttcccaccgtagtttg

SEQ ID NO: 166871 - DNA, 17 bp, Arabidopsis thaliana
tttcccacctatgtggc

SEQ ID NO: 166872 - DNA, 17 bp, Arabidopsis thaliana
tttcccacgatgaatat

SEQ ID NO: 166873 - DNA, 17 bp, Arabidopsis thaliana
tttcccagccaatagtt

SEQ ID NO: 166874 - DNA, 17 bp, Arabidopsis thaliana
tttcccagcccaaccca

SEQ ID NO: 166875 - DNA, 17 bp, Arabidopsis thaliana
tttcccagttttcgatt

SEQ ID NO: 166876 - DNA, 17 bp, Arabidopsis thaliana
tttcccagttttggatt

SEQ ID NO: 166877 - DNA, 17 bp, Arabidopsis thaliana
tttcccatccaaggacg

SEQ ID NO: 166878 - DNA, 17 bp, Arabidopsis thaliana
tttcccatcgccggatc

SEQ ID NO: 166879 - DNA, 17 bp, Arabidopsis thaliana
tttcccatctgagcaaa

SEQ ID NO: 166880 - DNA, 17 bp, Arabidopsis thaliana
tttcccattaggttttc

SEQ ID NO: 166881 - DNA, 17 bp, Arabidopsis thaliana
tttcccattgacgtttt

SEQ ID NO: 166882 - DNA, 17 bp, Arabidopsis thaliana
tttcccattggaccgtt

SEQ ID NO: 166883 - DNA, 17 bp, Arabidopsis thaliana
tttcccatttgccatgt

SEQ ID NO: 166884 - DNA, 17 bp, Arabidopsis thaliana
tttccccaaccgaatga

SEQ ID NO: 166885 - DNA, 17 bp, Arabidopsis thaliana
tttccccaaggcgtggc

SEQ ID NO: 166886 - DNA, 17 bp, Arabidopsis thaliana
tttccccacgagaacta

SEQ ID NO: 166887 - DNA, 17 bp, Arabidopsis thaliana
tttccccacgagaagta

SEQ ID NO: 166888 - DNA, 17 bp, Arabidopsis thaliana
tttccccaggaaagaag

SEQ ID NO: 166889 - DNA, 17 bp, Arabidopsis thaliana
tttccccattcgtacta

SEQ ID NO: 166890 - DNA, 17 bp, Arabidopsis thaliana
tttcccccgagaactat

SEQ ID NO: 166891 - DNA, 17 bp, Arabidopsis thaliana
tttccccgggcgtcgaa

SEQ ID NO: 166892 - DNA, 17 bp, Arabidopsis thaliana
tttccccggtgctgcgt

SEQ ID NO: 166893 - DNA, 17 bp, Arabidopsis thaliana
tttccccgtgttgcgtt

SEQ ID NO: 166894 - DNA, 17 bp, Arabidopsis thaliana
tttccccttggattgac

SEQ ID NO: 166895 - DNA, 17 bp, Arabidopsis thaliana
tttcccgacttcatcct

SEQ ID NO: 166896 - DNA, 17 bp, Arabidopsis thaliana
tttcccgagatctacat

SEQ ID NO: 166897 - DNA, 17 bp, Arabidopsis thaliana
tttcccgagtcaagaag

SEQ ID NO: 166898 - DNA, 17 bp, Arabidopsis thaliana
tttcccgattcaggtat

SEQ ID NO: 166899 - DNA, 17 bp, Arabidopsis thaliana
tttcccgattctcttag

SEQ ID NO: 166900 - DNA, 17 bp, Arabidopsis thaliana
tttcccgcagccagtct

SEQ ID NO: 166901 - DNA, 17 bp, Arabidopsis thaliana
tttcccgccaaaaccat

SEQ ID NO: 166902 - DNA, 17 bp, Arabidopsis thaliana
tttcccgccaaattttt

SEQ ID NO: 166903 - DNA, 17 bp, Arabidopsis thaliana
tttcccgccgtttcgca

SEQ ID NO: 166904 - DNA, 17 bp, Arabidopsis thaliana
tttcccgcgacagatct

SEQ ID NO: 166905 - DNA, 17 bp, Arabidopsis thaliana
tttcccgcgagagttcg

SEQ ID NO: 166906 - DNA, 17 bp, Arabidopsis thaliana
tttcccggcaacgttat

SEQ ID NO: 166907 - DNA, 17 bp, Arabidopsis thaliana
tttcccggctggtgcaa

SEQ ID NO: 166908 - DNA, 17 bp, Arabidopsis thaliana
tttcccggctggtgcac

SEQ ID NO: 166909 - DNA, 17 bp, Arabidopsis thaliana
tttcccggctggtgccc

SEQ ID NO: 166910 - DNA, 17 bp, Arabidopsis thaliana
tttcccgggacggtttt

SEQ ID NO: 166911 - DNA, 17 bp, Arabidopsis thaliana
tttcccggtcgtgagaa

SEQ ID NO: 166912 - DNA, 17 bp, Arabidopsis thaliana
tttcccgttcaccactc

SEQ ID NO: 166913 - DNA, 17 bp, Arabidopsis thaliana
tttcccgttcatcactt

SEQ ID NO: 166914 - DNA, 17 bp, Arabidopsis thaliana
tttccctaaaaactgcc

SEQ ID NO: 166915 - DNA, 17 bp, Arabidopsis thaliana
tttccctaaagctccga

SEQ ID NO: 166916 - DNA, 17 bp, Arabidopsis thaliana
tttccctaagtaggtcc

SEQ ID NO: 166917 - DNA, 17 bp, Arabidopsis thaliana
tttccctcaggatagct

SEQ ID NO: 166918 - DNA, 17 bp, Arabidopsis thaliana
tttccctcagtatagct

SEQ ID NO: 166919 - DNA, 17 bp, Arabidopsis thaliana
tttccctccgatgtggt

SEQ ID NO: 166920 - DNA, 17 bp, Arabidopsis thaliana
tttccctcgcaaatcgc

SEQ ID NO: 166921 - DNA, 17 bp, Arabidopsis thaliana
tttccctcggctgttcg

SEQ ID NO: 166922 - DNA, 17 bp, Arabidopsis thaliana
tttccctctcctccgat

SEQ ID NO: 166923 - DNA, 17 bp, Arabidopsis thaliana
tttccctctcgatcggt

SEQ ID NO: 166924 - DNA, 17 bp, Arabidopsis thaliana
tttccctctctctcttt

SEQ ID NO: 166925 - DNA, 17 bp, Arabidopsis thaliana
tttccctctctgccgat

SEQ ID NO: 166926 - DNA, 17 bp, Arabidopsis thaliana
tttccctctctgtgaag

SEQ ID NO: 166927 - DNA, 17 bp, Arabidopsis thaliana
tttccctcttggcacca

SEQ ID NO: 166928 - DNA, 17 bp, Arabidopsis thaliana
tttcccttaaggtttca

SEQ ID NO: 166929 - DNA, 17 bp, Arabidopsis thaliana
tttcccttcgtggtgct

SEQ ID NO: 166930 - DNA, 17 bp, Arabidopsis thaliana
tttcccttgagagacac

SEQ ID NO: 166931 - DNA, 17 bp, Arabidopsis thaliana
tttcccttgatcttagg

SEQ ID NO: 166932 - DNA, 17 bp, Arabidopsis thaliana
tttcccttgggaacgag

SEQ ID NO: 166933 - DNA, 17 bp, Arabidopsis thaliana
tttcccttgggacatct

SEQ ID NO: 166934 - DNA, 17 bp, Arabidopsis thaliana
tttccctttccgccgat

SEQ ID NO: 166935 - DNA, 17 bp, Arabidopsis thaliana
tttccctttgtcgagac

SEQ ID NO: 166936 - DNA, 17 bp, Arabidopsis thaliana
tttccctttgtcgctaa

SEQ ID NO: 166937 - DNA, 17 bp, Arabidopsis thaliana
tttccgaaaaactttaa

SEQ ID NO: 166938 - DNA, 17 bp, Arabidopsis thaliana
tttccgaaatgttgggc

SEQ ID NO: 166939 - DNA, 17 bp, Arabidopsis thaliana
tttccgaatggagacgt

SEQ ID NO: 166940 - DNA, 17 bp, Arabidopsis thaliana
tttccgacaacgtgggt

SEQ ID NO: 166941 - DNA, 17 bp, Arabidopsis thaliana
tttccgacaatagctgc

SEQ ID NO: 166942 - DNA, 17 bp, Arabidopsis thaliana
tttccgacaggtactat

SEQ ID NO: 166943 - DNA, 17 bp, Arabidopsis thaliana
tttccgacatccttatg

SEQ ID NO: 166944 - DNA, 17 bp, Arabidopsis thaliana
tttccgaccctcagtag

SEQ ID NO: 166945 - DNA, 17 bp, Arabidopsis thaliana
tttccgacgacgaattc

SEQ ID NO: 166946 - DNA, 17 bp, Arabidopsis thaliana
tttccgacggaattgcg

SEQ ID NO: 166947 - DNA, 17 bp, Arabidopsis thaliana
tttccgacggcgaagat

SEQ ID NO: 166948 - DNA, 17 bp, Arabidopsis thaliana
tttccgactaatgccaa

SEQ ID NO: 166949 - DNA, 17 bp, Arabidopsis thaliana
tttccgactaatgccag

SEQ ID NO: 166950 - DNA, 17 bp, Arabidopsis thaliana
tttccgactaatggcaa

SEQ ID NO: 166951 - DNA, 17 bp, Arabidopsis thaliana
tttccgactaatggcag

SEQ ID NO: 166952 - DNA, 17 bp, Arabidopsis thaliana
tttccgactaatggtag

SEQ ID NO: 166953 - DNA, 17 bp, Arabidopsis thaliana
tttccgactaatgtcaa

SEQ ID NO: 166954 - DNA, 17 bp, Arabidopsis thaliana
tttccgactgaatgatt

SEQ ID NO: 166955 - DNA, 17 bp, Arabidopsis thaliana
tttccgacttgtacttt

SEQ ID NO: 166956 - DNA, 17 bp, Arabidopsis thaliana
tttccgactttgtgaaa

SEQ ID NO: 166957 - DNA, 17 bp, Arabidopsis thaliana
tttccgagagacaggat

SEQ ID NO: 166958 - DNA, 17 bp, Arabidopsis thaliana
tttccgagatgttgggc

SEQ ID NO: 166959 - DNA, 17 bp, Arabidopsis thaliana
tttccgatagtaacaca

SEQ ID NO: 166960 - DNA, 17 bp, Arabidopsis thaliana
tttccgatagtaacacc

SEQ ID NO: 166961 - DNA, 17 bp, Arabidopsis thaliana
tttccgatcttattggt

SEQ ID NO: 166962 - DNA, 17 bp, Arabidopsis thaliana
tttccgatcttgaacct

SEQ ID NO: 166963 - DNA, 17 bp, Arabidopsis thaliana
tttccgatgtaacctcg

SEQ ID NO: 166964 - DNA, 17 bp, Arabidopsis thaliana
tttccgatgtgagacct

SEQ ID NO: 166965 - DNA, 17 bp, Arabidopsis thaliana
tttccgcaatgggcgaa

SEQ ID NO: 166966 - DNA, 17 bp, Arabidopsis thaliana
tttccgcactgagagca

SEQ ID NO: 166967 - DNA, 17 bp, Arabidopsis thaliana
tttccgcagaccttgtg

SEQ ID NO: 166968 - DNA, 17 bp, Arabidopsis thaliana
tttccgcagctcttgtg

SEQ ID NO: 166969 - DNA, 17 bp, Arabidopsis thaliana
tttccgcagtgactgta

SEQ ID NO: 166970 - DNA, 17 bp, Arabidopsis thaliana
tttccgcattcagaact

SEQ ID NO: 166971 - DNA, 17 bp, Arabidopsis thaliana
tttccgccaggattagc

SEQ ID NO: 166972 - DNA, 17 bp, Arabidopsis thaliana
tttccgccagtaagctt

SEQ ID NO: 166973 - DNA, 17 bp, Arabidopsis thaliana
tttccgcccgtcacact

SEQ ID NO: 166974 - DNA, 17 bp, Arabidopsis thaliana
tttccgccggctttgtg

SEQ ID NO: 166975 - DNA, 17 bp, Arabidopsis thaliana
tttccgcctatctttcc

SEQ ID NO: 166976 - DNA, 17 bp, Arabidopsis thaliana
tttccgcctattccatt

SEQ ID NO: 166977 - DNA, 17 bp, Arabidopsis thaliana
tttccgcctttaagatc

SEQ ID NO: 166978 - DNA, 17 bp, Arabidopsis thaliana
tttccgcgacaagtccg

SEQ ID NO: 166979 - DNA, 17 bp, Arabidopsis thaliana
tttccgcgacgacagat

SEQ ID NO: 166980 - DNA, 17 bp, Arabidopsis thaliana
tttccgcgacgtaggtt

SEQ ID NO: 166981 - DNA, 17 bp, Arabidopsis thaliana
tttccgcgctaagtgct

SEQ ID NO: 166982 - DNA, 17 bp, Arabidopsis thaliana
tttccgcgtctgctttg

SEQ ID NO: 166983 - DNA, 17 bp, Arabidopsis thaliana
tttccgcgttgtggttg

SEQ ID NO: 166984 - DNA, 17 bp, Arabidopsis thaliana
tttccgctacatgtatt

SEQ ID NO: 166985 - DNA, 17 bp, Arabidopsis thaliana
tttccgctcttggttaa

SEQ ID NO: 166986 - DNA, 17 bp, Arabidopsis thaliana
tttccggaatatttggc

SEQ ID NO: 166987 - DNA, 17 bp, Arabidopsis thaliana
tttccggaccgaattag

SEQ ID NO: 166988 - DNA, 17 bp, Arabidopsis thaliana
tttccggactagatagg

SEQ ID NO: 166989 - DNA, 17 bp, Arabidopsis thaliana
tttccggatttaggctc

SEQ ID NO: 166990 - DNA, 17 bp, Arabidopsis thaliana
tttccggcgaaaatccc

SEQ ID NO: 166991 - DNA, 17 bp, Arabidopsis thaliana
tttccggcgacttttcc

SEQ ID NO: 166992 - DNA, 17 bp, Arabidopsis thaliana
tttccggcgagctacat

SEQ ID NO: 166993 - DNA, 17 bp, Arabidopsis thaliana
tttccggcgagtctttc

SEQ ID NO: 166994 - DNA, 17 bp, Arabidopsis thaliana
tttccggcgatctgcgt

SEQ ID NO: 166995 - DNA, 17 bp, Arabidopsis thaliana
tttccggcgtaagatca

SEQ ID NO: 166996 - DNA, 17 bp, Arabidopsis thaliana
tttccggctattgtctc

SEQ ID NO: 166997 - DNA, 17 bp, Arabidopsis thaliana
tttccggctgctcctgt

SEQ ID NO: 166998 - DNA, 17 bp, Arabidopsis thaliana
tttccggtggcaatcga

SEQ ID NO: 166999 - DNA, 17 bp, Arabidopsis thaliana
tttccggtgttggccag

SEQ ID NO: 167000 - DNA, 17 bp, Arabidopsis thaliana
tttccggttcacgggcg

SEQ ID NO: 167001 - DNA, 17 bp, Arabidopsis thaliana
tttccgtcacttgatga

SEQ ID NO: 167002 - DNA, 17 bp, Arabidopsis thaliana
tttccgtccatctaccc

SEQ ID NO: 167003 - DNA, 17 bp, Arabidopsis thaliana
tttccgtcccgccaacc

SEQ ID NO: 167004 - DNA, 17 bp, Arabidopsis thaliana
tttccgtcggagctgtt

SEQ ID NO: 167005 - DNA, 17 bp, Arabidopsis thaliana
tttccgtcgtcttttga

SEQ ID NO: 167006 - DNA, 17 bp, Arabidopsis thaliana
tttccgtctcggatcaa

SEQ ID NO: 167007 - DNA, 17 bp, Arabidopsis thaliana
tttccgtctgggtatgc

SEQ ID NO: 167008 - DNA, 17 bp, Arabidopsis thaliana
tttccgtcttctatcgg

SEQ ID NO: 167009 - DNA, 17 bp, Arabidopsis thaliana
tttccgtgacctttgtt

SEQ ID NO: 167010 - DNA, 17 bp, Arabidopsis thaliana
tttccgtgattggtgat

SEQ ID NO: 167011 - DNA, 17 bp, Arabidopsis thaliana
tttccgtgccaaactat

SEQ ID NO: 167012 - DNA, 17 bp, Arabidopsis thaliana
tttccgtgccaaattat

SEQ ID NO: 167013 - DNA, 17 bp, Arabidopsis thaliana
tttccgtggttaggcac

SEQ ID NO: 167014 - DNA, 17 bp, Arabidopsis thaliana
tttccgtgtgaacaaaa

SEQ ID NO: 167015 - DNA, 17 bp, Arabidopsis thaliana
tttccgtgttacggctg

SEQ ID NO: 167016 - DNA, 17 bp, Arabidopsis thaliana
tttccgttaggtttgtt

SEQ ID NO: 167017 - DNA, 17 bp, Arabidopsis thaliana
tttccgttgcgactgtg

SEQ ID NO: 167018 - DNA, 17 bp, Arabidopsis thaliana
tttccgttggcgtatgt

SEQ ID NO: 167019 - DNA, 17 bp, Arabidopsis thaliana
tttccgttggtgtgcgc

SEQ ID NO: 167020 - DNA, 17 bp, Arabidopsis thaliana
tttccgttgttgtgcca

SEQ ID NO: 167021 - DNA, 17 bp, Arabidopsis thaliana
tttcctaaggtttcgtt

SEQ ID NO: 167022 - DNA, 17 bp, Arabidopsis thaliana
tttcctaaggttttggt

SEQ ID NO: 167023 - DNA, 17 bp, Arabidopsis thaliana
tttcctatctttagccc

SEQ ID NO: 167024 - DNA, 17 bp, Arabidopsis thaliana
tttcctcaaagtaagcc

SEQ ID NO: 167025 - DNA, 17 bp, Arabidopsis thaliana
tttcctcaccaaagctc

SEQ ID NO: 167026 - DNA, 17 bp, Arabidopsis thaliana
tttcctcagaattggtt

SEQ ID NO: 167027 - DNA, 17 bp, Arabidopsis thaliana
tttcctcagagtggtgc

SEQ ID NO: 167028 - DNA, 17 bp, Arabidopsis thaliana
tttcctcagatccttgc

SEQ ID NO: 167029 - DNA, 17 bp, Arabidopsis thaliana
tttcctcaggaatatcc

SEQ ID NO: 167030 - DNA, 17 bp, Arabidopsis thaliana
tttcctcaggattggct

SEQ ID NO: 167031 - DNA, 17 bp, Arabidopsis thaliana
tttcctcagttgtgacc

SEQ ID NO: 167032 - DNA, 17 bp, Arabidopsis thaliana
tttcctcagtttacagg

SEQ ID NO: 167033 - DNA, 17 bp, Arabidopsis thaliana
tttcctcatattggctt

SEQ ID NO: 167034 - DNA, 17 bp, Arabidopsis thaliana
tttcctcccattccatc

SEQ ID NO: 167035 - DNA, 17 bp, Arabidopsis thaliana
tttcctccctgtcggat

SEQ ID NO: 167036 - DNA, 17 bp, Arabidopsis thaliana
tttcctccgattttttt

SEQ ID NO: 167037 - DNA, 17 bp, Arabidopsis thaliana
tttcctcctcttctgcc

SEQ ID NO: 167038 - DNA, 17 bp, Arabidopsis thaliana
tttcctcctgagtcctg

SEQ ID NO: 167039 - DNA, 17 bp, Arabidopsis thaliana
tttcctcctgtgagtga

SEQ ID NO: 167040 - DNA, 17 bp, Arabidopsis thaliana
tttcctcgaagaggcta

SEQ ID NO: 167041 - DNA, 17 bp, Arabidopsis thaliana
tttcctcgacggctatt

SEQ ID NO: 167042 - DNA, 17 bp, Arabidopsis thaliana
tttcctcgagtgatgtc

SEQ ID NO: 167043 - DNA, 17 bp, Arabidopsis thaliana
tttcctcgatggagata

SEQ ID NO: 167044 - DNA, 17 bp, Arabidopsis thaliana
tttcctcgatggagatg

SEQ ID NO: 167045 - DNA, 17 bp, Arabidopsis thaliana
tttcctcggacttacga

SEQ ID NO: 167046 - DNA, 17 bp, Arabidopsis thaliana
tttcctcggatgtagag

SEQ ID NO: 167047 - DNA, 17 bp, Arabidopsis thaliana
tttcctcgggccggacg

SEQ ID NO: 167048 - DNA, 17 bp, Arabidopsis thaliana
tttcctcgtctttcgct

SEQ ID NO: 167049 - DNA, 17 bp, Arabidopsis thaliana
tttcctcgttgcatccc

SEQ ID NO: 167050 - DNA, 17 bp, Arabidopsis thaliana
tttcctctaaagtcccg

SEQ ID NO: 167051 - DNA, 17 bp, Arabidopsis thaliana
tttcctctaactgtcca

SEQ ID NO: 167052 - DNA, 17 bp, Arabidopsis thaliana
tttcctctattggtact

SEQ ID NO: 167053 - DNA, 17 bp, Arabidopsis thaliana
tttcctctcatgaggcc

SEQ ID NO: 167054 - DNA, 17 bp, Arabidopsis thaliana
tttcctctcctttgttt

SEQ ID NO: 167055 - DNA, 17 bp, Arabidopsis thaliana
tttcctctcgatcggtt

SEQ ID NO: 167056 - DNA, 17 bp, Arabidopsis thaliana
tttcctctctggcgtag

SEQ ID NO: 167057 - DNA, 17 bp, Arabidopsis thaliana
tttcctctgcattccgt

SEQ ID NO: 167058 - DNA, 17 bp, Arabidopsis thaliana
tttcctctgcgtcatag

SEQ ID NO: 167059 - DNA, 17 bp, Arabidopsis thaliana
tttcctctgttgtgtgc

SEQ ID NO: 167060 - DNA, 17 bp, Arabidopsis thaliana
tttcctcttcggcttca

SEQ ID NO: 167061 - DNA, 17 bp, Arabidopsis thaliana
tttcctcttctatttgc

SEQ ID NO: 167062 - DNA, 17 bp, Arabidopsis thaliana
tttcctctttctgagca

SEQ ID NO: 167063 - DNA, 17 bp, Arabidopsis thaliana
tttcctctttggttttc

SEQ ID NO: 167064 - DNA, 17 bp, Arabidopsis thaliana
tttcctgacacaaggct

SEQ ID NO: 167065 - DNA, 17 bp, Arabidopsis thaliana
tttcctgactgatcgca

SEQ ID NO: 167066 - DNA, 17 bp, Arabidopsis thaliana
tttcctgactggtcgca

SEQ ID NO: 167067 - DNA, 17 bp, Arabidopsis thaliana
tttcctgatatgtggct

SEQ ID NO: 167068 - DNA, 17 bp, Arabidopsis thaliana
tttcctgatatgtgggt

SEQ ID NO: 167069 - DNA, 17 bp, Arabidopsis thaliana
tttcctgccacgaaacg

SEQ ID NO: 167070 - DNA, 17 bp, Arabidopsis thaliana
tttcctgcgagaaattc

SEQ ID NO: 167071 - DNA, 17 bp, Arabidopsis thaliana
tttcctggaattttggg

SEQ ID NO: 167072 - DNA, 17 bp, Arabidopsis thaliana
tttcctggatccgccac

SEQ ID NO: 167073 - DNA, 17 bp, Arabidopsis thaliana
tttcctggatcggttag

SEQ ID NO: 167074 - DNA, 17 bp, Arabidopsis thaliana
tttcctggcaaaagctg

SEQ ID NO: 167075 - DNA, 17 bp, Arabidopsis thaliana
tttcctgggattggctt

SEQ ID NO: 167076 - DNA, 17 bp, Arabidopsis thaliana
tttcctggtggatgatg

SEQ ID NO: 167077 - DNA, 17 bp, Arabidopsis thaliana
tttcctggtgtagccaa

SEQ ID NO: 167078 - DNA, 17 bp, Arabidopsis thaliana
tttcctgtactttttgc

SEQ ID NO: 167079 - DNA, 17 bp, Arabidopsis thaliana
tttcctgtccagtttgc

SEQ ID NO: 167080 - DNA, 17 bp, Arabidopsis thaliana
tttcctgtctgttactc

SEQ ID NO: 167081 - DNA, 17 bp, Arabidopsis thaliana
tttcctgttgcagctgc

SEQ ID NO: 167082 - DNA, 17 bp, Arabidopsis thaliana
tttccttcatcttggtt

SEQ ID NO: 167083 - DNA, 17 bp, Arabidopsis thaliana
tttccttccaacacacg

SEQ ID NO: 167084 - DNA, 17 bp, Arabidopsis thaliana
tttccttcgatgtcggc

SEQ ID NO: 167085 - DNA, 17 bp, Arabidopsis thaliana
tttccttcttcggcgtc

SEQ ID NO: 167086 - DNA, 17 bp, Arabidopsis thaliana
tttccttgactcgcttt

SEQ ID NO: 167087 - DNA, 17 bp, Arabidopsis thaliana
tttccttgattcgccac

SEQ ID NO: 167088 - DNA, 17 bp, Arabidopsis thaliana
tttccttgcggcgctca

SEQ ID NO: 167089 - DNA, 17 bp, Arabidopsis thaliana
tttccttggcgtttggt

SEQ ID NO: 167090 - DNA, 17 bp, Arabidopsis thaliana
tttccttgggtgacctg

SEQ ID NO: 167091 - DNA, 17 bp, Arabidopsis thaliana
tttccttgtcgtggatc

SEQ ID NO: 167092 - DNA, 17 bp, Arabidopsis thaliana
tttccttgtcttccggt

SEQ ID NO: 167093 - DNA, 17 bp, Arabidopsis thaliana
tttccttgttagaagac

SEQ ID NO: 167094 - DNA, 17 bp, Arabidopsis thaliana
tttccttgttctgcttg

SEQ ID NO: 167095 - DNA, 17 bp, Arabidopsis thaliana
tttccttgtttctgaag

SEQ ID NO: 167096 - DNA, 17 bp, Arabidopsis thaliana
tttcctttctcaggcgt

SEQ ID NO: 167097 - DNA, 17 bp, Arabidopsis thaliana
tttcctttgtcgctaag

SEQ ID NO: 167098 - DNA, 17 bp, Arabidopsis thaliana
tttccttttgcagaacg

SEQ ID NO: 167099 - DNA, 17 bp, Arabidopsis thaliana
tttccttttgtcgctaa

SEQ ID NO: 167100 - DNA, 17 bp, Arabidopsis thaliana
tttccttttgttgcagg

SEQ ID NO: 167101 - DNA, 17 bp, Arabidopsis thaliana
tttcctttttcggtctt

SEQ ID NO: 167102 - DNA, 17 bp, Arabidopsis thaliana
tttccttttttctcaga

SEQ ID NO: 167103 - DNA, 17 bp, Arabidopsis thaliana
tttcgaaaagagtgttt

SEQ ID NO: 167104 - DNA, 17 bp, Arabidopsis thaliana
tttcgaaagagttttcg

SEQ ID NO: 167105 - DNA, 17 bp, Arabidopsis thaliana
tttcgaaagccgagagc

SEQ ID NO: 167106 - DNA, 17 bp, Arabidopsis thaliana
tttcgaaatccgatttc

SEQ ID NO: 167107 - DNA, 17 bp, Arabidopsis thaliana
tttcgaaccaggggaat

SEQ ID NO: 167108 - DNA, 17 bp, Arabidopsis thaliana
tttcgaacccgggcgaa

SEQ ID NO: 167109 - DNA, 17 bp, Arabidopsis thaliana
tttcgaacccgggctca

SEQ ID NO: 167110 - DNA, 17 bp, Arabidopsis thaliana
tttcgaacgcctgacaa

SEQ ID NO: 167111 - DNA, 17 bp, Arabidopsis thaliana
tttcgaacggtccaaag

SEQ ID NO: 167112 - DNA, 17 bp, Arabidopsis thaliana
tttcgaactaccaagct

SEQ ID NO: 167113 - DNA, 17 bp, Arabidopsis thaliana
tttcgaagaccgcgtga

SEQ ID NO: 167114 - DNA, 17 bp, Arabidopsis thaliana
tttcgaaggaccggtag

SEQ ID NO: 167115 - DNA, 17 bp, Arabidopsis thaliana
tttcgaaggcgactttc

SEQ ID NO: 167116 - DNA, 17 bp, Arabidopsis thaliana
tttcgaagttcaagcct

SEQ ID NO: 167117 - DNA, 17 bp, Arabidopsis thaliana
tttcgaagttcgcatcc

SEQ ID NO: 167118 - DNA, 17 bp, Arabidopsis thaliana
tttcgaatagtgcaagc

SEQ ID NO: 167119 - DNA, 17 bp, Arabidopsis thaliana
tttcgaatgacgaggcc

SEQ ID NO: 167120 - DNA, 17 bp, Arabidopsis thaliana
tttcgaatgatcacagc

SEQ ID NO: 167121 - DNA, 17 bp, Arabidopsis thaliana
tttcgaatgcgcaagta

SEQ ID NO: 167122 - DNA, 17 bp, Arabidopsis thaliana
tttcgaattatcgacca

SEQ ID NO: 167123 - DNA, 17 bp, Arabidopsis thaliana
tttcgacaaatgtccga

SEQ ID NO: 167124 - DNA, 17 bp, Arabidopsis thaliana
tttcgacaagatactgt

SEQ ID NO: 167125 - DNA, 17 bp, Arabidopsis thaliana
tttcgacatcgacgcca

SEQ ID NO: 167126 - DNA, 17 bp, Arabidopsis thaliana
tttcgaccagcttatcc

SEQ ID NO: 167127 - DNA, 17 bp, Arabidopsis thaliana
tttcgacccaaaacctt

SEQ ID NO: 167128 - DNA, 17 bp, Arabidopsis thaliana
tttcgaccccccccccc

SEQ ID NO: 167129 - DNA, 17 bp, Arabidopsis thaliana
tttcgacgaggccgctc

SEQ ID NO: 167130 - DNA, 17 bp, Arabidopsis thaliana
tttcgacgcggattacg

SEQ ID NO: 167131 - DNA, 17 bp, Arabidopsis thaliana
tttcgacggcacgaccg

SEQ ID NO: 167132 - DNA, 17 bp, Arabidopsis thaliana
tttcgacgtgttggtga

SEQ ID NO: 167133 - DNA, 17 bp, Arabidopsis thaliana
tttcgacgttgctccga

SEQ ID NO: 167134 - DNA, 17 bp, Arabidopsis thaliana
tttcgactatcttggcg

SEQ ID NO: 167135 - DNA, 17 bp, Arabidopsis thaliana
tttcgagacctcctggt

SEQ ID NO: 167136 - DNA, 17 bp, Arabidopsis thaliana
tttcgagactacccgtg

SEQ ID NO: 167137 - DNA, 17 bp, Arabidopsis thaliana
tttcgagacttcccgct

SEQ ID NO: 167138 - DNA, 17 bp, Arabidopsis thaliana
tttcgagacttgcagga

SEQ ID NO: 167139 - DNA, 17 bp, Arabidopsis thaliana
tttcgagagagactgta

SEQ ID NO: 167140 - DNA, 17 bp, Arabidopsis thaliana
tttcgagcggcccaaag

SEQ ID NO: 167141 - DNA, 17 bp, Arabidopsis thaliana
tttcgagcggtccaaaa

SEQ ID NO: 167142 - DNA, 17 bp, Arabidopsis thaliana
tttcgagctgatgagac

SEQ ID NO: 167143 - DNA, 17 bp, Arabidopsis thaliana
tttcgagggcacgtctg

SEQ ID NO: 167144 - DNA, 17 bp, Arabidopsis thaliana
tttcgagtagaccttgt

SEQ ID NO: 167145 - DNA, 17 bp, Arabidopsis thaliana
tttcgagtccccaaatt

SEQ ID NO: 167146 - DNA, 17 bp, Arabidopsis thaliana
tttcgagtcctgattta

SEQ ID NO: 167147 - DNA, 17 bp, Arabidopsis thaliana
tttcgataaaaccgctt

SEQ ID NO: 167148 - DNA, 17 bp, Arabidopsis thaliana
tttcgataaagaatccg

SEQ ID NO: 167149 - DNA, 17 bp, Arabidopsis thaliana
tttcgatacacgggtgt

SEQ ID NO: 167150 - DNA, 17 bp, Arabidopsis thaliana
tttcgatcagcttttgg

SEQ ID NO: 167151 - DNA, 17 bp, Arabidopsis thaliana
tttcgatcccattctat

SEQ ID NO: 167152 - DNA, 17 bp, Arabidopsis thaliana
tttcgatcctattgtgt

SEQ ID NO: 167153 - DNA, 17 bp, Arabidopsis thaliana
tttcgatcctccgatgt

SEQ ID NO: 167154 - DNA, 17 bp, Arabidopsis thaliana
tttcgatcgcctcggtt

SEQ ID NO: 167155 - DNA, 17 bp, Arabidopsis thaliana
tttcgatcggttcgttt

SEQ ID NO: 167156 - DNA, 17 bp, Arabidopsis thaliana
tttcgatcgtctgacgg

SEQ ID NO: 167157 - DNA, 17 bp, Arabidopsis thaliana
tttcgatggtaggatag

SEQ ID NO: 167158 - DNA, 17 bp, Arabidopsis thaliana
tttcgatgtctaccagt

SEQ ID NO: 167159 - DNA, 17 bp, Arabidopsis thaliana
tttcgatgtctagcagt

SEQ ID NO: 167160 - DNA, 17 bp, Arabidopsis thaliana
tttcgatgtctgttcga

SEQ ID NO: 167161 - DNA, 17 bp, Arabidopsis thaliana
tttcgatgtgattggtc

SEQ ID NO: 167162 - DNA, 17 bp, Arabidopsis thaliana
tttcgatgtgggacatt

SEQ ID NO: 167163 - DNA, 17 bp, Arabidopsis thaliana
tttcgattcagattagg

SEQ ID NO: 167164 - DNA, 17 bp, Arabidopsis thaliana
tttcgattcaggacatt

SEQ ID NO: 167165 - DNA, 17 bp, Arabidopsis thaliana
tttcgattctctggaaa

SEQ ID NO: 167166 - DNA, 17 bp, Arabidopsis thaliana
tttcgatttcgagcgtt

SEQ ID NO: 167167 - DNA, 17 bp, Arabidopsis thaliana
tttcgatttctctgtcg

SEQ ID NO: 167168 - DNA, 17 bp, Arabidopsis thaliana
tttcgcaaagttgtgat

SEQ ID NO: 167169 - DNA, 17 bp, Arabidopsis thaliana
tttcgcaacttggagat

SEQ ID NO: 167170 - DNA, 17 bp, Arabidopsis thaliana
tttcgcaactttcatag

SEQ ID NO: 167171 - DNA, 17 bp, Arabidopsis thaliana
tttcgcaagatagtctg

SEQ ID NO: 167172 - DNA, 17 bp, Arabidopsis thaliana
tttcgcaccaaataccg

SEQ ID NO: 167173 - DNA, 17 bp, Arabidopsis thaliana
tttcgcagacactgtgt

SEQ ID NO: 167174 - DNA, 17 bp, Arabidopsis thaliana
tttcgcagatagtggca

SEQ ID NO: 167175 - DNA, 17 bp, Arabidopsis thaliana
tttcgcaggaggtccga

SEQ ID NO: 167176 - DNA, 17 bp, Arabidopsis thaliana
tttcgcatagcgcagtg

SEQ ID NO: 167177 - DNA, 17 bp, Arabidopsis thaliana
tttcgcatcctgtagat

SEQ ID NO: 167178 - DNA, 17 bp, Arabidopsis thaliana
tttcgccaaagctctta

SEQ ID NO: 167179 - DNA, 17 bp, Arabidopsis thaliana
tttcgccaacagcctat

SEQ ID NO: 167180 - DNA, 17 bp, Arabidopsis thaliana
tttcgccaggtttcatt

SEQ ID NO: 167181 - DNA, 17 bp, Arabidopsis thaliana
tttcgccattaagtctc

SEQ ID NO: 167182 - DNA, 17 bp, Arabidopsis thaliana
tttcgccgaagattcaa

SEQ ID NO: 167183 - DNA, 17 bp, Arabidopsis thaliana
tttcgccgacgaattgt

SEQ ID NO: 167184 - DNA, 17 bp, Arabidopsis thaliana
tttcgccggcgatttga

SEQ ID NO: 167185 - DNA, 17 bp, Arabidopsis thaliana
tttcgccggttgagtcg

SEQ ID NO: 167186 - DNA, 17 bp, Arabidopsis thaliana
tttcgccgttggattga

SEQ ID NO: 167187 - DNA, 17 bp, Arabidopsis thaliana
tttcgcctcagaacctc

SEQ ID NO: 167188 - DNA, 17 bp, Arabidopsis thaliana
tttcgcctcagaacctt

SEQ ID NO: 167189 - DNA, 17 bp, Arabidopsis thaliana
tttcgcgaagctcattt

SEQ ID NO: 167190 - DNA, 17 bp, Arabidopsis thaliana
tttcgcgattgagctgt

SEQ ID NO: 167191 - DNA, 17 bp, Arabidopsis thaliana
tttcgcgcgagtttgcc

SEQ ID NO: 167192 - DNA, 17 bp, Arabidopsis thaliana
tttcgcggacttgaaat

SEQ ID NO: 167193 - DNA, 17 bp, Arabidopsis thaliana
tttcgcggataagtgtt

SEQ ID NO: 167194 - DNA, 17 bp, Arabidopsis thaliana
tttcgcggttcggaatt

SEQ ID NO: 167195 - DNA, 17 bp, Arabidopsis thaliana
tttcgctaggtttcttc

SEQ ID NO: 167196 - DNA, 17 bp, Arabidopsis thaliana
tttcgctagtgtcgttc

SEQ ID NO: 167197 - DNA, 17 bp, Arabidopsis thaliana
tttcgctcaaggtgtac

SEQ ID NO: 167198 - DNA, 17 bp, Arabidopsis thaliana
tttcgctcagtgactat

SEQ ID NO: 167199 - DNA, 17 bp, Arabidopsis thaliana
tttcgctccgcccgata

SEQ ID NO: 167200 - DNA, 17 bp, Arabidopsis thaliana
tttcgctcgatgtgtct

SEQ ID NO: 167201 - DNA, 17 bp, Arabidopsis thaliana
tttcgctggaatcaact

SEQ ID NO: 167202 - DNA, 17 bp, Arabidopsis thaliana
tttcgctgtaggaactt

SEQ ID NO: 167203 - DNA, 17 bp, Arabidopsis thaliana
tttcgctgtcaggttct

SEQ ID NO: 167204 - DNA, 17 bp, Arabidopsis thaliana
tttcgcttcttcggatt

SEQ ID NO: 167205 - DNA, 17 bp, Arabidopsis thaliana
tttcggaaagcccaaag

SEQ ID NO: 167206 - DNA, 17 bp, Arabidopsis thaliana
tttcggaaattacggct

SEQ ID NO: 167207 - DNA, 17 bp, Arabidopsis thaliana
tttcggaactgcactat

SEQ ID NO: 167208 - DNA, 17 bp, Arabidopsis thaliana
tttcggaagttgagtag

SEQ ID NO: 167209 - DNA, 17 bp, Arabidopsis thaliana
tttcggaccaggcttca

SEQ ID NO: 167210 - DNA, 17 bp, Arabidopsis thaliana
tttcggacccgggcgaa

SEQ ID NO: 167211 - DNA, 17 bp, Arabidopsis thaliana
tttcggaccgtaaccag

SEQ ID NO: 167212 - DNA, 17 bp, Arabidopsis thaliana
tttcggacctaggggat

SEQ ID NO: 167213 - DNA, 17 bp, Arabidopsis thaliana
tttcggacctcctgcga

SEQ ID NO: 167214 - DNA, 17 bp, Arabidopsis thaliana
tttcggacctgagagat

SEQ ID NO: 167215 - DNA, 17 bp, Arabidopsis thaliana
tttcggacgctgtgtac

SEQ ID NO: 167216 - DNA, 17 bp, Arabidopsis thaliana
tttcggactttcggatt

SEQ ID NO: 167217 - DNA, 17 bp, Arabidopsis thaliana
tttcggagacaaagtcg

SEQ ID NO: 167218 - DNA, 17 bp, Arabidopsis thaliana
tttcggagccagattat

SEQ ID NO: 167219 - DNA, 17 bp, Arabidopsis thaliana
tttcggatacgctgaag

SEQ ID NO: 167220 - DNA, 17 bp, Arabidopsis thaliana
tttcggatatcccacca

SEQ ID NO: 167221 - DNA, 17 bp, Arabidopsis thaliana
tttcggatccaaagatg

SEQ ID NO: 167222 - DNA, 17 bp, Arabidopsis thaliana
tttcggatcgcggcgac

SEQ ID NO: 167223 - DNA, 17 bp, Arabidopsis thaliana
tttcggatctttgggta

SEQ ID NO: 167224 - DNA, 17 bp, Arabidopsis thaliana
tttcggcatagaattct

SEQ ID NO: 167225 - DNA, 17 bp, Arabidopsis thaliana
tttcggcccagaacctc

SEQ ID NO: 167226 - DNA, 17 bp, Arabidopsis thaliana
tttcggcccagaacctt

SEQ ID NO: 167227 - DNA, 17 bp, Arabidopsis thaliana
tttcggcccagagtctc

SEQ ID NO: 167228 - DNA, 17 bp, Arabidopsis thaliana
tttcggccttcaggaac

SEQ ID NO: 167229 - DNA, 17 bp, Arabidopsis thaliana
tttcggccttttcgtga

SEQ ID NO: 167230 - DNA, 17 bp, Arabidopsis thaliana
tttcggcgaaagaatct

SEQ ID NO: 167231 - DNA, 17 bp, Arabidopsis thaliana
tttcggcgaatttgaca

SEQ ID NO: 167232 - DNA, 17 bp, Arabidopsis thaliana
tttcggcgggaaacttt

SEQ ID NO: 167233 - DNA, 17 bp, Arabidopsis thaliana
tttcggctccggacgct

SEQ ID NO: 167234 - DNA, 17 bp, Arabidopsis thaliana
tttcggctgattcggtt

SEQ ID NO: 167235 - DNA, 17 bp, Arabidopsis thaliana
tttcggcttagaattct

SEQ ID NO: 167236 - DNA, 17 bp, Arabidopsis thaliana
tttcggcttagtggtgt

SEQ ID NO: 167237 - DNA, 17 bp, Arabidopsis thaliana
tttcggcttcggccaaa

SEQ ID NO: 167238 - DNA, 17 bp, Arabidopsis thaliana
tttcggcttggtgttct

SEQ ID NO: 167239 - DNA, 17 bp, Arabidopsis thaliana
tttcgggaccggtgccg

SEQ ID NO: 167240 - DNA, 17 bp, Arabidopsis thaliana
tttcgggagagtgtttt

SEQ ID NO: 167241 - DNA, 17 bp, Arabidopsis thaliana
tttcgggagggaagcgg

SEQ ID NO: 167242 - DNA, 17 bp, Arabidopsis thaliana
tttcgggattccgctgt

SEQ ID NO: 167243 - DNA, 17 bp, Arabidopsis thaliana
tttcgggattctgtcag

SEQ ID NO: 167244 - DNA, 17 bp, Arabidopsis thaliana
tttcgggcattttcgtg

SEQ ID NO: 167245 - DNA, 17 bp, Arabidopsis thaliana
tttcgggcattttcgtt

SEQ ID NO: 167246 - DNA, 17 bp, Arabidopsis thaliana
tttcgggccgtgtattg

SEQ ID NO: 167247 - DNA, 17 bp, Arabidopsis thaliana
tttcgggcctaggggag

SEQ ID NO: 167248 - DNA, 17 bp, Arabidopsis thaliana
tttcgggcctgagggat

SEQ ID NO: 167249 - DNA, 17 bp, Arabidopsis thaliana
tttcgggcctgagggga

SEQ ID NO: 167250 - DNA, 17 bp, Arabidopsis thaliana
tttcgggcctggaggat

SEQ ID NO: 167251 - DNA, 17 bp, Arabidopsis thaliana
tttcgggcctgggatcg

SEQ ID NO: 167252 - DNA, 17 bp, Arabidopsis thaliana
tttcgggcctgggggat

SEQ ID NO: 167253 - DNA, 17 bp, Arabidopsis thaliana
tttcgggccttttcgtg

SEQ ID NO: 167254 - DNA, 17 bp, Arabidopsis thaliana
tttcgggctttacccac

SEQ ID NO: 167255 - DNA, 17 bp, Arabidopsis thaliana
tttcggggattacgagt

SEQ ID NO: 167256 - DNA, 17 bp, Arabidopsis thaliana
tttcgggtatgccatga

SEQ ID NO: 167257 - DNA, 17 bp, Arabidopsis thaliana
tttcgggtcataacgga

SEQ ID NO: 167258 - DNA, 17 bp, Arabidopsis thaliana
tttcgggttcaggtcgg

SEQ ID NO: 167259 - DNA, 17 bp, Arabidopsis thaliana
tttcggtccagttcgct

SEQ ID NO: 167260 - DNA, 17 bp, Arabidopsis thaliana
tttcggtcgcgagttgg

SEQ ID NO: 167261 - DNA, 17 bp, Arabidopsis thaliana
tttcggtcgctggttta

SEQ ID NO: 167262 - DNA, 17 bp, Arabidopsis thaliana
tttcggtcggagttgaa

SEQ ID NO: 167263 - DNA, 17 bp, Arabidopsis thaliana
tttcggtcttagggtaa

SEQ ID NO: 167264 - DNA, 17 bp, Arabidopsis thaliana
tttcggtgcgtttctgc

SEQ ID NO: 167265 - DNA, 17 bp, Arabidopsis thaliana
tttcggtggactggttt

SEQ ID NO: 167266 - DNA, 17 bp, Arabidopsis thaliana
tttcggtggcggcctaa

SEQ ID NO: 167267 - DNA, 17 bp, Arabidopsis thaliana
tttcggtgtgcttgcta

SEQ ID NO: 167268 - DNA, 17 bp, Arabidopsis thaliana
tttcggtgttcttcaag

SEQ ID NO: 167269 - DNA, 17 bp, Arabidopsis thaliana
tttcggttcaactttag

SEQ ID NO: 167270 - DNA, 17 bp, Arabidopsis thaliana
tttcggttcggattcgg

SEQ ID NO: 167271 - DNA, 17 bp, Arabidopsis thaliana
tttcggttcgggtctaa

SEQ ID NO: 167272 - DNA, 17 bp, Arabidopsis thaliana
tttcggttctctggatt

SEQ ID NO: 167273 - DNA, 17 bp, Arabidopsis thaliana
tttcggtttgcagagac

SEQ ID NO: 167274 - DNA, 17 bp, Arabidopsis thaliana
tttcggttttgaagttt

SEQ ID NO: 167275 - DNA, 17 bp, Arabidopsis thaliana
tttcgtaacagtttacc

SEQ ID NO: 167276 - DNA, 17 bp, Arabidopsis thaliana
tttcgtacccgggctca

SEQ ID NO: 167277 - DNA, 17 bp, Arabidopsis thaliana
tttcgtactgtgcattc

SEQ ID NO: 167278 - DNA, 17 bp, Arabidopsis thaliana
tttcgtagcctctttag

SEQ ID NO: 167279 - DNA, 17 bp, Arabidopsis thaliana
tttcgtatctaggtatc

SEQ ID NO: 167280 - DNA, 17 bp, Arabidopsis thaliana
tttcgtcacatgcttcc

SEQ ID NO: 167281 - DNA, 17 bp, Arabidopsis thaliana
tttcgtcagttgattcc

SEQ ID NO: 167282 - DNA, 17 bp, Arabidopsis thaliana
tttcgtcatggactttg

SEQ ID NO: 167283 - DNA, 17 bp, Arabidopsis thaliana
tttcgtccaccacttgt

SEQ ID NO: 167284 - DNA, 17 bp, Arabidopsis thaliana
tttcgtccagcgacgca

SEQ ID NO: 167285 - DNA, 17 bp, Arabidopsis thaliana
tttcgtccgaaaagtcc

SEQ ID NO: 167286 - DNA, 17 bp, Arabidopsis thaliana
tttcgtcctaagcgtca

SEQ ID NO: 167287 - DNA, 17 bp, Arabidopsis thaliana
tttcgtcctcgaaacta

SEQ ID NO: 167288 - DNA, 17 bp, Arabidopsis thaliana
tttcgtcgaacgctgaa

SEQ ID NO: 167289 - DNA, 17 bp, Arabidopsis thaliana
tttcgtcgactttgaag

SEQ ID NO: 167290 - DNA, 17 bp, Arabidopsis thaliana
tttcgtcgagcgctgaa

SEQ ID NO: 167291 - DNA, 17 bp, Arabidopsis thaliana
tttcgtcgcattgtcac

SEQ ID NO: 167292 - DNA, 17 bp, Arabidopsis thaliana
tttcgtcggagggctgt

SEQ ID NO: 167293 - DNA, 17 bp, Arabidopsis thaliana
tttcgtcggagtcgcta

SEQ ID NO: 167294 - DNA, 17 bp, Arabidopsis thaliana
tttcgtcgtctgttcga

SEQ ID NO: 167295 - DNA, 17 bp, Arabidopsis thaliana
tttcgtctcaagcgtca

SEQ ID NO: 167296 - DNA, 17 bp, Arabidopsis thaliana
tttcgtctccatcatgc

SEQ ID NO: 167297 - DNA, 17 bp, Arabidopsis thaliana
tttcgtctctttcggcc

SEQ ID NO: 167298 - DNA, 17 bp, Arabidopsis thaliana
tttcgtctgatgtccac

SEQ ID NO: 167299 - DNA, 17 bp, Arabidopsis thaliana
tttcgtctgcctgggtg

SEQ ID NO: 167300 - DNA, 17 bp, Arabidopsis thaliana
tttcgtcttcaacggga

SEQ ID NO: 167301 - DNA, 17 bp, Arabidopsis thaliana
tttcgtcttctggaccc

SEQ ID NO: 167302 - DNA, 17 bp, Arabidopsis thaliana
tttcgtgacatcctcag

SEQ ID NO: 167303 - DNA, 17 bp, Arabidopsis thaliana
tttcgtgagcatgtcgg

SEQ ID NO: 167304 - DNA, 17 bp, Arabidopsis thaliana
tttcgtgatttgggcta

SEQ ID NO: 167305 - DNA, 17 bp, Arabidopsis thaliana
tttcgtgcatgcgacat

SEQ ID NO: 167306 - DNA, 17 bp, Arabidopsis thaliana
tttcgtgccaaataatc

SEQ ID NO: 167307 - DNA, 17 bp, Arabidopsis thaliana
tttcgtgccaagttatc

SEQ ID NO: 167308 - DNA, 17 bp, Arabidopsis thaliana
tttcgtgccaagttttc

SEQ ID NO: 167309 - DNA, 17 bp, Arabidopsis thaliana
tttcgtgcctgccttta

SEQ ID NO: 167310 - DNA, 17 bp, Arabidopsis thaliana
tttcgtgctaaattatc

SEQ ID NO: 167311 - DNA, 17 bp, Arabidopsis thaliana
tttcgtgctgggaaaag

SEQ ID NO: 167312 - DNA, 17 bp, Arabidopsis thaliana
tttcgtggcagatcatt

SEQ ID NO: 167313 - DNA, 17 bp, Arabidopsis thaliana
tttcgtggctaatttcc

SEQ ID NO: 167314 - DNA, 17 bp, Arabidopsis thaliana
tttcgtggtgtgaactc

SEQ ID NO: 167315 - DNA, 17 bp, Arabidopsis thaliana
tttcgtgtagtctccag

SEQ ID NO: 167316 - DNA, 17 bp, Arabidopsis thaliana
tttcgtgtcaatttgtg

SEQ ID NO: 167317 - DNA, 17 bp, Arabidopsis thaliana
tttcgttcagctacatc

SEQ ID NO: 167318 - DNA, 17 bp, Arabidopsis thaliana
tttcgttcccagctgga

SEQ ID NO: 167319 - DNA, 17 bp, Arabidopsis thaliana
tttcgttccgacgtcaa

SEQ ID NO: 167320 - DNA, 17 bp, Arabidopsis thaliana
tttcgttccgtctccgg

SEQ ID NO: 167321 - DNA, 17 bp, Arabidopsis thaliana
tttcgttcctgggcagc

SEQ ID NO: 167322 - DNA, 17 bp, Arabidopsis thaliana
tttcgttcgccgagagt

SEQ ID NO: 167323 - DNA, 17 bp, Arabidopsis thaliana
tttcgttcggagatgag

SEQ ID NO: 167324 - DNA, 17 bp, Arabidopsis thaliana
tttcgttcttcgcggat

SEQ ID NO: 167325 - DNA, 17 bp, Arabidopsis thaliana
tttcgttcttcttcgct

SEQ ID NO: 167326 - DNA, 17 bp, Arabidopsis thaliana
tttcgttctttgttcga

SEQ ID NO: 167327 - DNA, 17 bp, Arabidopsis thaliana
tttcgttgaccaagccg

SEQ ID NO: 167328 - DNA, 17 bp, Arabidopsis thaliana
tttcgttgactaggcca

SEQ ID NO: 167329 - DNA, 17 bp, Arabidopsis thaliana
tttcgttgactgggccg

SEQ ID NO: 167330 - DNA, 17 bp, Arabidopsis thaliana
tttcgttgacttgacca

SEQ ID NO: 167331 - DNA, 17 bp, Arabidopsis thaliana
tttcgttgacttggcca

SEQ ID NO: 167332 - DNA, 17 bp, Arabidopsis thaliana
tttcgttgactttgcta

SEQ ID NO: 167333 - DNA, 17 bp, Arabidopsis thaliana
tttcgttgactttgtta

SEQ ID NO: 167334 - DNA, 17 bp, Arabidopsis thaliana
tttcgttgcaactttcc

SEQ ID NO: 167335 - DNA, 17 bp, Arabidopsis thaliana
tttcgttgccggcgcag

SEQ ID NO: 167336 - DNA, 17 bp, Arabidopsis thaliana
tttcgttgctcttggcc

SEQ ID NO: 167337 - DNA, 17 bp, Arabidopsis thaliana
tttcgttggaccgtttc

SEQ ID NO: 167338 - DNA, 17 bp, Arabidopsis thaliana
tttcgttggcagtagac

SEQ ID NO: 167339 - DNA, 17 bp, Arabidopsis thaliana
tttcgttgtctgttcaa

SEQ ID NO: 167340 - DNA, 17 bp, Arabidopsis thaliana
tttcgttgtctgttcga

SEQ ID NO: 167341 - DNA, 17 bp, Arabidopsis thaliana
tttcgttgtctgtttga

SEQ ID NO: 167342 - DNA, 17 bp, Arabidopsis thaliana
tttcgttgtctttttga

SEQ ID NO: 167343 - DNA, 17 bp, Arabidopsis thaliana
tttcgttgtttgttcga

SEQ ID NO: 167344 - DNA, 17 bp, Arabidopsis thaliana
tttcgtttcagttcgtt

SEQ ID NO: 167345 - DNA, 17 bp, Arabidopsis thaliana
tttcgtttcccggctgg

SEQ ID NO: 167346 - DNA, 17 bp, Arabidopsis thaliana
tttctaaaaccactgct

SEQ ID NO: 167347 - DNA, 17 bp, Arabidopsis thaliana
tttctaaacatgactct

SEQ ID NO: 167348 - DNA, 17 bp, Arabidopsis thaliana
tttctaaaccgaccgag

SEQ ID NO: 167349 - DNA, 17 bp, Arabidopsis thaliana
tttctaaactagataag

SEQ ID NO: 167350 - DNA, 17 bp, Arabidopsis thaliana
tttctaaacttccgatg

SEQ ID NO: 167351 - DNA, 17 bp, Arabidopsis thaliana
tttctaaagggtggtcc

SEQ ID NO: 167352 - DNA, 17 bp, Arabidopsis thaliana
tttctaacaagacctac

SEQ ID NO: 167353 - DNA, 17 bp, Arabidopsis thaliana
tttctaaccacgtgtgt

SEQ ID NO: 167354 - DNA, 17 bp, Arabidopsis thaliana
tttctaacgcaagactc

SEQ ID NO: 167355 - DNA, 17 bp, Arabidopsis thaliana
tttctaacgtccgtccg

SEQ ID NO: 167356 - DNA, 17 bp, Arabidopsis thaliana
tttctaactaataccac

SEQ ID NO: 167357 - DNA, 17 bp, Arabidopsis thaliana
tttctaactcatggatg

SEQ ID NO: 167358 - DNA, 17 bp, Arabidopsis thaliana
tttctaacttcgccaga

SEQ ID NO: 167359 - DNA, 17 bp, Arabidopsis thaliana
tttctaagagaggcttt

SEQ ID NO: 167360 - DNA, 17 bp, Arabidopsis thaliana
tttctaagatcaggttg

SEQ ID NO: 167361 - DNA, 17 bp, Arabidopsis thaliana
tttctaagcaagggaat

SEQ ID NO: 167362 - DNA, 17 bp, Arabidopsis thaliana
tttctaagcgatgtggg

SEQ ID NO: 167363 - DNA, 17 bp, Arabidopsis thaliana
tttctaaggcccagaca

SEQ ID NO: 167364 - DNA, 17 bp, Arabidopsis thaliana
tttctaagttacgatcg

SEQ ID NO: 167365 - DNA, 17 bp, Arabidopsis thaliana
tttctaagttgttcgtt

SEQ ID NO: 167366 - DNA, 17 bp, Arabidopsis thaliana
tttctaatgaggctgat

SEQ ID NO: 167367 - DNA, 17 bp, Arabidopsis thaliana
tttctaatgtcagggtc

SEQ ID NO: 167368 - DNA, 17 bp, Arabidopsis thaliana
tttctaatttgtgaaac

SEQ ID NO: 167369 - DNA, 17 bp, Arabidopsis thaliana
tttctaatttttggccc

SEQ ID NO: 167370 - DNA, 17 bp, Arabidopsis thaliana
tttctacaaaggttacc

SEQ ID NO: 167371 - DNA, 17 bp, Arabidopsis thaliana
tttctacagggttttgc

SEQ ID NO: 167372 - DNA, 17 bp, Arabidopsis thaliana
tttctacagttaagcat

SEQ ID NO: 167373 - DNA, 17 bp, Arabidopsis thaliana
tttctacagttccagga

SEQ ID NO: 167374 - DNA, 17 bp, Arabidopsis thaliana
tttctacatgaagttgc

SEQ ID NO: 167375 - DNA, 17 bp, Arabidopsis thaliana
tttctacattattgctc

SEQ ID NO: 167376 - DNA, 17 bp, Arabidopsis thaliana
tttctacattttccgtc

SEQ ID NO: 167377 - DNA, 17 bp, Arabidopsis thaliana
tttctaccaatatcagg

SEQ ID NO: 167378 - DNA, 17 bp, Arabidopsis thaliana
tttctaccatccgatca

SEQ ID NO: 167379 - DNA, 17 bp, Arabidopsis thaliana
tttctaccatctctgtg

SEQ ID NO: 167380 - DNA, 17 bp, Arabidopsis thaliana
tttctacccagtccgtc

SEQ ID NO: 167381 - DNA, 17 bp, Arabidopsis thaliana
tttctacccattaggcc

SEQ ID NO: 167382 - DNA, 17 bp, Arabidopsis thaliana
tttctaccctcctgatt

SEQ ID NO: 167383 - DNA, 17 bp, Arabidopsis thaliana
tttctaccgaaactgac

SEQ ID NO: 167384 - DNA, 17 bp, Arabidopsis thaliana
tttctaccgaagctgac

SEQ ID NO: 167385 - DNA, 17 bp, Arabidopsis thaliana
tttctaccgacgactga

SEQ ID NO: 167386 - DNA, 17 bp, Arabidopsis thaliana
tttctaccgactcccgg

SEQ ID NO: 167387 - DNA, 17 bp, Arabidopsis thaliana
tttctaccgagactggc

SEQ ID NO: 167388 - DNA, 17 bp, Arabidopsis thaliana
tttctaccgagcctccc

SEQ ID NO: 167389 - DNA, 17 bp, Arabidopsis thaliana
tttctaccgaggctggc

SEQ ID NO: 167390 - DNA, 17 bp, Arabidopsis thaliana
tttctaccggggctaac

SEQ ID NO: 167391 - DNA, 17 bp, Arabidopsis thaliana
tttctaccggggttgat

SEQ ID NO: 167392 - DNA, 17 bp, Arabidopsis thaliana
tttctaccttctgggct

SEQ ID NO: 167393 - DNA, 17 bp, Arabidopsis thaliana
tttctacgccttgctgt

SEQ ID NO: 167394 - DNA, 17 bp, Arabidopsis thaliana
tttctacggggacacag

SEQ ID NO: 167395 - DNA, 17 bp, Arabidopsis thaliana
tttctacggttggatcc

SEQ ID NO: 167396 - DNA, 17 bp, Arabidopsis thaliana
tttctacgtccagagat

SEQ ID NO: 167397 - DNA, 17 bp, Arabidopsis thaliana
tttctacgtttgacagg

SEQ ID NO: 167398 - DNA, 17 bp, Arabidopsis thaliana
tttctactatcctgggc

SEQ ID NO: 167399 - DNA, 17 bp, Arabidopsis thaliana
tttctactcagcgctgc

SEQ ID NO: 167400 - DNA, 17 bp, Arabidopsis thaliana
tttctactgagaccgag

SEQ ID NO: 167401 - DNA, 17 bp, Arabidopsis thaliana
tttctactgagtaacgg

SEQ ID NO: 167402 - DNA, 17 bp, Arabidopsis thaliana
tttctactgataccgat

SEQ ID NO: 167403 - DNA, 17 bp, Arabidopsis thaliana
tttctactgtgttccaa

SEQ ID NO: 167404 - DNA, 17 bp, Arabidopsis thaliana
tttctactgttgaattc

SEQ ID NO: 167405 - DNA, 17 bp, Arabidopsis thaliana
tttctacttttgtcctg

SEQ ID NO: 167406 - DNA, 17 bp, Arabidopsis thaliana
tttctagagtttggatg

SEQ ID NO: 167407 - DNA, 17 bp, Arabidopsis thaliana
tttctagtccgaagccc

SEQ ID NO: 167408 - DNA, 17 bp, Arabidopsis thaliana
tttctagttttcatgag

SEQ ID NO: 167409 - DNA, 17 bp, Arabidopsis thaliana
tttctatcagtccaaga

SEQ ID NO: 167410 - DNA, 17 bp, Arabidopsis thaliana
tttctatcgggattgga

SEQ ID NO: 167411 - DNA, 17 bp, Arabidopsis thaliana
tttctatgattggtgcc

SEQ ID NO: 167412 - DNA, 17 bp, Arabidopsis thaliana
tttctatgattggtgtc

SEQ ID NO: 167413 - DNA, 17 bp, Arabidopsis thaliana
tttctatgccaaatgac

SEQ ID NO: 167414 - DNA, 17 bp, Arabidopsis thaliana
tttctatgcggcgcaca

SEQ ID NO: 167415 - DNA, 17 bp, Arabidopsis thaliana
tttctatgctcagacga

SEQ ID NO: 167416 - DNA, 17 bp, Arabidopsis thaliana
tttctatggatccgcga

SEQ ID NO: 167417 - DNA, 17 bp, Arabidopsis thaliana
tttctatgggccaagtt

SEQ ID NO: 167418 - DNA, 17 bp, Arabidopsis thaliana
tttctatgggtggtggt

SEQ ID NO: 167419 - DNA, 17 bp, Arabidopsis thaliana
tttctatgtacccaccc

SEQ ID NO: 167420 - DNA, 17 bp, Arabidopsis thaliana
tttctatgtacccgccg

SEQ ID NO: 167421 - DNA, 17 bp, Arabidopsis thaliana
tttctatgtacccgtcg

SEQ ID NO: 167422 - DNA, 17 bp, Arabidopsis thaliana
tttctatgtacccgtct

SEQ ID NO: 167423 - DNA, 17 bp, Arabidopsis thaliana
tttctatgtccaatctg

SEQ ID NO: 167424 - DNA, 17 bp, Arabidopsis thaliana
tttctattagctcagtg

SEQ ID NO: 167425 - DNA, 17 bp, Arabidopsis thaliana
tttctattccaagttgg

SEQ ID NO: 167426 - DNA, 17 bp, Arabidopsis thaliana
tttctattccgacagcg

SEQ ID NO: 167427 - DNA, 17 bp, Arabidopsis thaliana
tttctattcggggacaa

SEQ ID NO: 167428 - DNA, 17 bp, Arabidopsis thaliana
tttctattgggcttgat

SEQ ID NO: 167429 - DNA, 17 bp, Arabidopsis thaliana
tttctattttcagcggc

SEQ ID NO: 167430 - DNA, 17 bp, Arabidopsis thaliana
tttctattttttttggt

SEQ ID NO: 167431 - DNA, 17 bp, Arabidopsis thaliana
tttctcaacatctctgg

SEQ ID NO: 167432 - DNA, 17 bp, Arabidopsis thaliana
tttctcaactttggcca

SEQ ID NO: 167433 - DNA, 17 bp, Arabidopsis thaliana
tttctcaatgccctttt

SEQ ID NO: 167434 - DNA, 17 bp, Arabidopsis thaliana
tttctcaattaccatca

SEQ ID NO: 167435 - DNA, 17 bp, Arabidopsis thaliana
tttctcaattctgtcga

SEQ ID NO: 167436 - DNA, 17 bp, Arabidopsis thaliana
tttctcacaggcgaaat

SEQ ID NO: 167437 - DNA, 17 bp, Arabidopsis thaliana
tttctcacgagaacggg

SEQ ID NO: 167438 - DNA, 17 bp, Arabidopsis thaliana
tttctcacgcttcatcg

SEQ ID NO: 167439 - DNA, 17 bp, Arabidopsis thaliana
tttctcactgaacctta

SEQ ID NO: 167440 - DNA, 17 bp, Arabidopsis thaliana
tttctcacttggtgttt

SEQ ID NO: 167441 - DNA, 17 bp, Arabidopsis thaliana
tttctcagcaccggaac

SEQ ID NO: 167442 - DNA, 17 bp, Arabidopsis thaliana
tttctcaggagggatag

SEQ ID NO: 167443 - DNA, 17 bp, Arabidopsis thaliana
tttctcaggcgttgtct

SEQ ID NO: 167444 - DNA, 17 bp, Arabidopsis thaliana
tttctcagggtgttctt

SEQ ID NO: 167445 - DNA, 17 bp, Arabidopsis thaliana
tttctcagtcttgcggg

SEQ ID NO: 167446 - DNA, 17 bp, Arabidopsis thaliana
tttctcagtggtgtagg

SEQ ID NO: 167447 - DNA, 17 bp, Arabidopsis thaliana
tttctcatccggctcgc

SEQ ID NO: 167448 - DNA, 17 bp, Arabidopsis thaliana
tttctcatcctcatcag

SEQ ID NO: 167449 - DNA, 17 bp, Arabidopsis thaliana
tttctcatcgtggtggt

SEQ ID NO: 167450 - DNA, 17 bp, Arabidopsis thaliana
tttctcatctgttgact

SEQ ID NO: 167451 - DNA, 17 bp, Arabidopsis thaliana
tttctcatggaaaccat

SEQ ID NO: 167452 - DNA, 17 bp, Arabidopsis thaliana
tttctcatggatggaga

SEQ ID NO: 167453 - DNA, 17 bp, Arabidopsis thaliana
tttctcatggattcgtg

SEQ ID NO: 167454 - DNA, 17 bp, Arabidopsis thaliana
tttctcatgtaagccag

SEQ ID NO: 167455 - DNA, 17 bp, Arabidopsis thaliana
tttctcattaacggtgc

SEQ ID NO: 167456 - DNA, 17 bp, Arabidopsis thaliana
tttctcattttccattt

SEQ ID NO: 167457 - DNA, 17 bp, Arabidopsis thaliana
tttctccaatctgctag

SEQ ID NO: 167458 - DNA, 17 bp, Arabidopsis thaliana
tttctccacctaggcct

SEQ ID NO: 167459 - DNA, 17 bp, Arabidopsis thaliana
tttctccacgagaacta

SEQ ID NO: 167460 - DNA, 17 bp, Arabidopsis thaliana
tttctccataactcgct

SEQ ID NO: 167461 - DNA, 17 bp, Arabidopsis thaliana
tttctccatatgcggtg

SEQ ID NO: 167462 - DNA, 17 bp, Arabidopsis thaliana
tttctccatgcgcttga

SEQ ID NO: 167463 - DNA, 17 bp, Arabidopsis thaliana
tttctccattcgaagcc

SEQ ID NO: 167464 - DNA, 17 bp, Arabidopsis thaliana
tttctccattgactttt

SEQ ID NO: 167465 - DNA, 17 bp, Arabidopsis thaliana
tttctcccgcatgtacc

SEQ ID NO: 167466 - DNA, 17 bp, Arabidopsis thaliana
tttctccgacttcgccg

SEQ ID NO: 167467 - DNA, 17 bp, Arabidopsis thaliana
tttctccgacttgtttc

SEQ ID NO: 167468 - DNA, 17 bp, Arabidopsis thaliana
tttctccgaggagcgct

SEQ ID NO: 167469 - DNA, 17 bp, Arabidopsis thaliana
tttctccgattggacca

SEQ ID NO: 167470 - DNA, 17 bp, Arabidopsis thaliana
tttctccgatttttttc

SEQ ID NO: 167471 - DNA, 17 bp, Arabidopsis thaliana
tttctccgctggatctg

SEQ ID NO: 167472 - DNA, 17 bp, Arabidopsis thaliana
tttctccggacctgcat

SEQ ID NO: 167473 - DNA, 17 bp, Arabidopsis thaliana
tttctccggcgagacgt

SEQ ID NO: 167474 - DNA, 17 bp, Arabidopsis thaliana
tttctccggcttgatgg

SEQ ID NO: 167475 - DNA, 17 bp, Arabidopsis thaliana
tttctccggcttgattg

SEQ ID NO: 167476 - DNA, 17 bp, Arabidopsis thaliana
tttctccggtgttgctg

SEQ ID NO: 167477 - DNA, 17 bp, Arabidopsis thaliana
tttctccgtatgagtct

SEQ ID NO: 167478 - DNA, 17 bp, Arabidopsis thaliana
tttctccgtgaaatttg

SEQ ID NO: 167479 - DNA, 17 bp, Arabidopsis thaliana
tttctcctactccgccc

SEQ ID NO: 167480 - DNA, 17 bp, Arabidopsis thaliana
tttctcctattcgatcg

SEQ ID NO: 167481 - DNA, 17 bp, Arabidopsis thaliana
tttctcctgattcggac

SEQ ID NO: 167482 - DNA, 17 bp, Arabidopsis thaliana
tttctcctgttgcagct

SEQ ID NO: 167483 - DNA, 17 bp, Arabidopsis thaliana
tttctccttctccatcc

SEQ ID NO: 167484 - DNA, 17 bp, Arabidopsis thaliana
tttctccttctccatgc

SEQ ID NO: 167485 - DNA, 17 bp, Arabidopsis thaliana
tttctccttggtgatca

SEQ ID NO: 167486 - DNA, 17 bp, Arabidopsis thaliana
tttctcgacaagccgtc

SEQ ID NO: 167487 - DNA, 17 bp, Arabidopsis thaliana
tttctcgacgattccaa

SEQ ID NO: 167488 - DNA, 17 bp, Arabidopsis thaliana
tttctcgacgatttcca

SEQ ID NO: 167489 - DNA, 17 bp, Arabidopsis thaliana
tttctcgagacccgtgc

SEQ ID NO: 167490 - DNA, 17 bp, Arabidopsis thaliana
tttctcgcacttaagct

SEQ ID NO: 167491 - DNA, 17 bp, Arabidopsis thaliana
tttctcgcagttgccac

SEQ ID NO: 167492 - DNA, 17 bp, Arabidopsis thaliana
tttctcgccactacgtc

SEQ ID NO: 167493 - DNA, 17 bp, Arabidopsis thaliana
tttctcgccgcagatct

SEQ ID NO: 167494 - DNA, 17 bp, Arabidopsis thaliana
tttctcgctacaatgtt

SEQ ID NO: 167495 - DNA, 17 bp, Arabidopsis thaliana
tttctcgctcaattttc

SEQ ID NO: 167496 - DNA, 17 bp, Arabidopsis thaliana
tttctcggaacgccccc

SEQ ID NO: 167497 - DNA, 17 bp, Arabidopsis thaliana
tttctcggacctggtcg

SEQ ID NO: 167498 - DNA, 17 bp, Arabidopsis thaliana
tttctcggacgctactg

SEQ ID NO: 167499 - DNA, 17 bp, Arabidopsis thaliana
tttctcggactagcggg

SEQ ID NO: 167500 - DNA, 17 bp, Arabidopsis thaliana
tttctcggatgattgga

SEQ ID NO: 167501 - DNA, 17 bp, Arabidopsis thaliana
tttctcggatggaagtt

SEQ ID NO: 167502 - DNA, 17 bp, Arabidopsis thaliana
tttctcggctaagagta

SEQ ID NO: 167503 - DNA, 17 bp, Arabidopsis thaliana
tttctcgggtctgtggg

SEQ ID NO: 167504 - DNA, 17 bp, Arabidopsis thaliana
tttctcggtcggatggt

SEQ ID NO: 167505 - DNA, 17 bp, Arabidopsis thaliana
tttctcgtaaccactag

SEQ ID NO: 167506 - DNA, 17 bp, Arabidopsis thaliana
tttctcgtcgtcggcga

SEQ ID NO: 167507 - DNA, 17 bp, Arabidopsis thaliana
tttctcgttccagggca

SEQ ID NO: 167508 - DNA, 17 bp, Arabidopsis thaliana
tttctctacgctatgtt

SEQ ID NO: 167509 - DNA, 17 bp, Arabidopsis thaliana
tttctctacttcagctt

SEQ ID NO: 167510 - DNA, 17 bp, Arabidopsis thaliana
tttctctaggaaccatc

SEQ ID NO: 167511 - DNA, 17 bp, Arabidopsis thaliana
tttctctaggcctgaaa

SEQ ID NO: 167512 - DNA, 17 bp, Arabidopsis thaliana
tttctctaggcctgtaa

SEQ ID NO: 167513 - DNA, 17 bp, Arabidopsis thaliana
tttctctatctttgctc

SEQ ID NO: 167514 - DNA, 17 bp, Arabidopsis thaliana
tttctctatgtgcaact

SEQ ID NO: 167515 - DNA, 17 bp, Arabidopsis thaliana
tttctctcagacattac

SEQ ID NO: 167516 - DNA, 17 bp, Arabidopsis thaliana
tttctctccgaggtgta

SEQ ID NO: 167517 - DNA, 17 bp, Arabidopsis thaliana
tttctctcctaagtcct

SEQ ID NO: 167518 - DNA, 17 bp, Arabidopsis thaliana
tttctctcctctcaatt

SEQ ID NO: 167519 - DNA, 17 bp, Arabidopsis thaliana
tttctctccttgtggat

SEQ ID NO: 167520 - DNA, 17 bp, Arabidopsis thaliana
tttctctcgaatgcgag

SEQ ID NO: 167521 - DNA, 17 bp, Arabidopsis thaliana
tttctctcgccggatat

SEQ ID NO: 167522 - DNA, 17 bp, Arabidopsis thaliana
tttctctcgctaatttt

SEQ ID NO: 167523 - DNA, 17 bp, Arabidopsis thaliana
tttctctcggatgtgtt

SEQ ID NO: 167524 - DNA, 17 bp, Arabidopsis thaliana
tttctctctcctgagtg

SEQ ID NO: 167525 - DNA, 17 bp, Arabidopsis thaliana
tttctctctcgacggaa

SEQ ID NO: 167526 - DNA, 17 bp, Arabidopsis thaliana
tttctctctcggttcta

SEQ ID NO: 167527 - DNA, 17 bp, Arabidopsis thaliana
tttctctgacagaatcg

SEQ ID NO: 167528 - DNA, 17 bp, Arabidopsis thaliana
tttctctgacgtgctac

SEQ ID NO: 167529 - DNA, 17 bp, Arabidopsis thaliana
tttctctgagacacagt

SEQ ID NO: 167530 - DNA, 17 bp, Arabidopsis thaliana
tttctctgaggttctct

SEQ ID NO: 167531 - DNA, 17 bp, Arabidopsis thaliana
tttctctgcagagaaac

SEQ ID NO: 167532 - DNA, 17 bp, Arabidopsis thaliana
tttctctggcatgaatc

SEQ ID NO: 167533 - DNA, 17 bp, Arabidopsis thaliana
tttctctggctatgctg

SEQ ID NO: 167534 - DNA, 17 bp, Arabidopsis thaliana
tttctctggttcatcct

SEQ ID NO: 167535 - DNA, 17 bp, Arabidopsis thaliana
tttctctggttttcaaa

SEQ ID NO: 167536 - DNA, 17 bp, Arabidopsis thaliana
tttctctgtcggcgtat

SEQ ID NO: 167537 - DNA, 17 bp, Arabidopsis thaliana
tttctctgtgttatcgg

SEQ ID NO: 167538 - DNA, 17 bp, Arabidopsis thaliana
tttctcttccatccgct

SEQ ID NO: 167539 - DNA, 17 bp, Arabidopsis thaliana
tttctcttctccatttg

SEQ ID NO: 167540 - DNA, 17 bp, Arabidopsis thaliana
tttctcttctgaccaat

SEQ ID NO: 167541 - DNA, 17 bp, Arabidopsis thaliana
tttctcttggcgtttgg

SEQ ID NO: 167542 - DNA, 17 bp, Arabidopsis thaliana
tttctctttatcaaggg

SEQ ID NO: 167543 - DNA, 17 bp, Arabidopsis thaliana
tttctctttgatgtgag

SEQ ID NO: 167544 - DNA, 17 bp, Arabidopsis thaliana
tttctctttttacctga

SEQ ID NO: 167545 - DNA, 17 bp, Arabidopsis thaliana
tttctctttttggaaag

SEQ ID NO: 167546 - DNA, 17 bp, Arabidopsis thaliana
tttctgaaaacagagac

SEQ ID NO: 167547 - DNA, 17 bp, Arabidopsis thaliana
tttctgaaaacagggac

SEQ ID NO: 167548 - DNA, 17 bp, Arabidopsis thaliana
tttctgaaaccagcaac

SEQ ID NO: 167549 - DNA, 17 bp, Arabidopsis thaliana
tttctgaaacctctaaa

SEQ ID NO: 167550 - DNA, 17 bp, Arabidopsis thaliana
tttctgaaagatcagat

SEQ ID NO: 167551 - DNA, 17 bp, Arabidopsis thaliana
tttctgaaggtgaagaa

SEQ ID NO: 167552 - DNA, 17 bp, Arabidopsis thaliana
tttctgaatggagatga

SEQ ID NO: 167553 - DNA, 17 bp, Arabidopsis thaliana
tttctgaatttccgcag

SEQ ID NO: 167554 - DNA, 17 bp, Arabidopsis thaliana
tttctgacacaagatca

SEQ ID NO: 167555 - DNA, 17 bp, Arabidopsis thaliana
tttctgaccaacaacca

SEQ ID NO: 167556 - DNA, 17 bp, Arabidopsis thaliana
tttctgaccatgggatg

SEQ ID NO: 167557 - DNA, 17 bp, Arabidopsis thaliana
tttctgaccgaatggga

SEQ ID NO: 167558 - DNA, 17 bp, Arabidopsis thaliana
tttctgacctccggttc

SEQ ID NO: 167559 - DNA, 17 bp, Arabidopsis thaliana
tttctgacgccttattt

SEQ ID NO: 167560 - DNA, 17 bp, Arabidopsis thaliana
tttctgactacacggct

SEQ ID NO: 167561 - DNA, 17 bp, Arabidopsis thaliana
tttctgactttggtttg

SEQ ID NO: 167562 - DNA, 17 bp, Arabidopsis thaliana
tttctgagactcagact

SEQ ID NO: 167563 - DNA, 17 bp, Arabidopsis thaliana
tttctgagcctgccaat

SEQ ID NO: 167564 - DNA, 17 bp, Arabidopsis thaliana
tttctgagcttctatca

SEQ ID NO: 167565 - DNA, 17 bp, Arabidopsis thaliana
tttctgagctttgttcc

SEQ ID NO: 167566 - DNA, 17 bp, Arabidopsis thaliana
tttctgaggagggaagg

SEQ ID NO: 167567 - DNA, 17 bp, Arabidopsis thaliana
tttctgagtcggtaaag

SEQ ID NO: 167568 - DNA, 17 bp, Arabidopsis thaliana
tttctgagtggatggga

SEQ ID NO: 167569 - DNA, 17 bp, Arabidopsis thaliana
tttctgatggccagaaa

SEQ ID NO: 167570 - DNA, 17 bp, Arabidopsis thaliana
tttctgcaacctgtagt

SEQ ID NO: 167571 - DNA, 17 bp, Arabidopsis thaliana
tttctgcacacttgcct

SEQ ID NO: 167572 - DNA, 17 bp, Arabidopsis thaliana
tttctgcacagtaggct

SEQ ID NO: 167573 - DNA, 17 bp, Arabidopsis thaliana
tttctgcactttgtccg

SEQ ID NO: 167574 - DNA, 17 bp, Arabidopsis thaliana
tttctgcagaattggca

SEQ ID NO: 167575 - DNA, 17 bp, Arabidopsis thaliana
tttctgcagccaaggag

SEQ ID NO: 167576 - DNA, 17 bp, Arabidopsis thaliana
tttctgcaggaaaatca

SEQ ID NO: 167577 - DNA, 17 bp, Arabidopsis thaliana
tttctgcagtgtaccgc

SEQ ID NO: 167578 - DNA, 17 bp, Arabidopsis thaliana
tttctgcagttggccag

SEQ ID NO: 167579 - DNA, 17 bp, Arabidopsis thaliana
tttctgcccagtgctct

SEQ ID NO: 167580 - DNA, 17 bp, Arabidopsis thaliana
tttctgcctccagagcg

SEQ ID NO: 167581 - DNA, 17 bp, Arabidopsis thaliana
tttctgcgacttcgaca

SEQ ID NO: 167582 - DNA, 17 bp, Arabidopsis thaliana
tttctgcgatgtgtttt

SEQ ID NO: 167583 - DNA, 17 bp, Arabidopsis thaliana
tttctgcgggaagcatt

SEQ ID NO: 167584 - DNA, 17 bp, Arabidopsis thaliana
tttctgctgttaaatct

SEQ ID NO: 167585 - DNA, 17 bp, Arabidopsis thaliana
tttctgcttccgtcttt

SEQ ID NO: 167586 - DNA, 17 bp, Arabidopsis thaliana
tttctgcttctttgcgc

SEQ ID NO: 167587 - DNA, 17 bp, Arabidopsis thaliana
tttctgcttgagtctga

SEQ ID NO: 167588 - DNA, 17 bp, Arabidopsis thaliana
tttctggaattctgcag

SEQ ID NO: 167589 - DNA, 17 bp, Arabidopsis thaliana
tttctggacgtttctga

SEQ ID NO: 167590 - DNA, 17 bp, Arabidopsis thaliana
tttctggagaccaaacc

SEQ ID NO: 167591 - DNA, 17 bp, Arabidopsis thaliana
tttctggaggataggcc

SEQ ID NO: 167592 - DNA, 17 bp, Arabidopsis thaliana
tttctggagtgacccat

SEQ ID NO: 167593 - DNA, 17 bp, Arabidopsis thaliana
tttctggatatcggctt

SEQ ID NO: 167594 - DNA, 17 bp, Arabidopsis thaliana
tttctggatgtctgcat

SEQ ID NO: 167595 - DNA, 17 bp, Arabidopsis thaliana
tttctggattgccgaac

SEQ ID NO: 167596 - DNA, 17 bp, Arabidopsis thaliana
tttctggatttacagga

SEQ ID NO: 167597 - DNA, 17 bp, Arabidopsis thaliana
tttctggatttgggcct

SEQ ID NO: 167598 - DNA, 17 bp, Arabidopsis thaliana
tttctggattttcggcg

SEQ ID NO: 167599 - DNA, 17 bp, Arabidopsis thaliana
tttctggccacgtattt

SEQ ID NO: 167600 - DNA, 17 bp, Arabidopsis thaliana
tttctggccacgtgttt

SEQ ID NO: 167601 - DNA, 17 bp, Arabidopsis thaliana
tttctggccctttgtag

SEQ ID NO: 167602 - DNA, 17 bp, Arabidopsis thaliana
tttctggcggcaaaatc

SEQ ID NO: 167603 - DNA, 17 bp, Arabidopsis thaliana
tttctggcgggaaaatc

SEQ ID NO: 167604 - DNA, 17 bp, Arabidopsis thaliana
tttctggctccctgtat

SEQ ID NO: 167605 - DNA, 17 bp, Arabidopsis thaliana
tttctgggctaaacggt

SEQ ID NO: 167606 - DNA, 17 bp, Arabidopsis thaliana
tttctgggctgcaactg

SEQ ID NO: 167607 - DNA, 17 bp, Arabidopsis thaliana
tttctgggttagacttg

SEQ ID NO: 167608 - DNA, 17 bp, Arabidopsis thaliana
tttctgggtttcggcga

SEQ ID NO: 167609 - DNA, 17 bp, Arabidopsis thaliana
tttctggttcacgggcg

SEQ ID NO: 167610 - DNA, 17 bp, Arabidopsis thaliana
tttctggttgatcctgc

SEQ ID NO: 167611 - DNA, 17 bp, Arabidopsis thaliana
tttctgtaggcggtctc

SEQ ID NO: 167612 - DNA, 17 bp, Arabidopsis thaliana
tttctgtatgctcgcac

SEQ ID NO: 167613 - DNA, 17 bp, Arabidopsis thaliana
tttctgtcaaccaaacg

SEQ ID NO: 167614 - DNA, 17 bp, Arabidopsis thaliana
tttctgtcaccactttc

SEQ ID NO: 167615 - DNA, 17 bp, Arabidopsis thaliana
tttctgtccagaattgt

SEQ ID NO: 167616 - DNA, 17 bp, Arabidopsis thaliana
tttctgtctccagtcct

SEQ ID NO: 167617 - DNA, 17 bp, Arabidopsis thaliana
tttctgtctgttactcg

SEQ ID NO: 167618 - DNA, 17 bp, Arabidopsis thaliana
tttctgtgacagttgag

SEQ ID NO: 167619 - DNA, 17 bp, Arabidopsis thaliana
tttctgtgtattgcttt

SEQ ID NO: 167620 - DNA, 17 bp, Arabidopsis thaliana
tttctgtttcaactggc

SEQ ID NO: 167621 - DNA, 17 bp, Arabidopsis thaliana
tttctgtttcattgccg

SEQ ID NO: 167622 - DNA, 17 bp, Arabidopsis thaliana
tttctgtttttccgtct

SEQ ID NO: 167623 - DNA, 17 bp, Arabidopsis thaliana
tttcttaaaggcagccg

SEQ ID NO: 167624 - DNA, 17 bp, Arabidopsis thaliana
tttcttaaatgcctagg

SEQ ID NO: 167625 - DNA, 17 bp, Arabidopsis thaliana
tttcttaacccacgttc

SEQ ID NO: 167626 - DNA, 17 bp, Arabidopsis thaliana
tttcttaagcgagagcc

SEQ ID NO: 167627 - DNA, 17 bp, Arabidopsis thaliana
tttcttaaggcattggc

SEQ ID NO: 167628 - DNA, 17 bp, Arabidopsis thaliana
tttcttacaaactgttc

SEQ ID NO: 167629 - DNA, 17 bp, Arabidopsis thaliana
tttcttacaagatcggg

SEQ ID NO: 167630 - DNA, 17 bp, Arabidopsis thaliana
tttcttaccaatggaga

SEQ ID NO: 167631 - DNA, 17 bp, Arabidopsis thaliana
tttcttaccacatccgg

SEQ ID NO: 167632 - DNA, 17 bp, Arabidopsis thaliana
tttcttactgttcatcg

SEQ ID NO: 167633 - DNA, 17 bp, Arabidopsis thaliana
tttcttagaatcaagcg

SEQ ID NO: 167634 - DNA, 17 bp, Arabidopsis thaliana
tttcttagattttctgg

SEQ ID NO: 167635 - DNA, 17 bp, Arabidopsis thaliana
tttcttagccgattcct

SEQ ID NO: 167636 - DNA, 17 bp, Arabidopsis thaliana
tttcttagcgaaaacgg

SEQ ID NO: 167637 - DNA, 17 bp, Arabidopsis thaliana
tttcttagtcgcatcct

SEQ ID NO: 167638 - DNA, 17 bp, Arabidopsis thaliana
tttcttatggttgcagt

SEQ ID NO: 167639 - DNA, 17 bp, Arabidopsis thaliana
tttcttatttcatcgcg

SEQ ID NO: 167640 - DNA, 17 bp, Arabidopsis thaliana
tttcttcaaaataggct

SEQ ID NO: 167641 - DNA, 17 bp, Arabidopsis thaliana
tttcttcaaactatctc

SEQ ID NO: 167642 - DNA, 17 bp, Arabidopsis thaliana
tttcttcaactggtacg

SEQ ID NO: 167643 - DNA, 17 bp, Arabidopsis thaliana
tttcttcacagcgattt

SEQ ID NO: 167644 - DNA, 17 bp, Arabidopsis thaliana
tttcttcacccgtgacc

SEQ ID NO: 167645 - DNA, 17 bp, Arabidopsis thaliana
tttcttcaccgctgttg

SEQ ID NO: 167646 - DNA, 17 bp, Arabidopsis thaliana
tttcttcagatggctca

SEQ ID NO: 167647 - DNA, 17 bp, Arabidopsis thaliana
tttcttcagatggttcc

SEQ ID NO: 167648 - DNA, 17 bp, Arabidopsis thaliana
tttcttcaggcgttggt

SEQ ID NO: 167649 - DNA, 17 bp, Arabidopsis thaliana
tttcttcagggctcagc

SEQ ID NO: 167650 - DNA, 17 bp, Arabidopsis thaliana
tttcttcaggggctcag

SEQ ID NO: 167651 - DNA, 17 bp, Arabidopsis thaliana
tttcttcatccagatgg

SEQ ID NO: 167652 - DNA, 17 bp, Arabidopsis thaliana
tttcttcatcggaccaa

SEQ ID NO: 167653 - DNA, 17 bp, Arabidopsis thaliana
tttcttcatctacttgc

SEQ ID NO: 167654 - DNA, 17 bp, Arabidopsis thaliana
tttcttccaatcccgag

SEQ ID NO: 167655 - DNA, 17 bp, Arabidopsis thaliana
tttcttccatgattgcg

SEQ ID NO: 167656 - DNA, 17 bp, Arabidopsis thaliana
tttcttccgacaacgtg

SEQ ID NO: 167657 - DNA, 17 bp, Arabidopsis thaliana
tttcttccgacccttat

SEQ ID NO: 167658 - DNA, 17 bp, Arabidopsis thaliana
tttcttcctcggagttt

SEQ ID NO: 167659 - DNA, 17 bp, Arabidopsis thaliana
tttcttccttgccatga

SEQ ID NO: 167660 - DNA, 17 bp, Arabidopsis thaliana
tttcttcgaatcgccgg

SEQ ID NO: 167661 - DNA, 17 bp, Arabidopsis thaliana
tttcttcgatccaaaag

SEQ ID NO: 167662 - DNA, 17 bp, Arabidopsis thaliana
tttcttcgcaaattaag

SEQ ID NO: 167663 - DNA, 17 bp, Arabidopsis thaliana
tttcttcgcagttgcga

SEQ ID NO: 167664 - DNA, 17 bp, Arabidopsis thaliana
tttcttcgccgtgttta

SEQ ID NO: 167665 - DNA, 17 bp, Arabidopsis thaliana
tttcttcggacaaagaa

SEQ ID NO: 167666 - DNA, 17 bp, Arabidopsis thaliana
tttcttcggatcgtcta

SEQ ID NO: 167667 - DNA, 17 bp, Arabidopsis thaliana
tttcttcggcttatgac

SEQ ID NO: 167668 - DNA, 17 bp, Arabidopsis thaliana
tttcttcgggcgtcgaa

SEQ ID NO: 167669 - DNA, 17 bp, Arabidopsis thaliana
tttcttcgtatgggtga

SEQ ID NO: 167670 - DNA, 17 bp, Arabidopsis thaliana
tttcttcgtctgttgct

SEQ ID NO: 167671 - DNA, 17 bp, Arabidopsis thaliana
tttcttcgtgaatatct

SEQ ID NO: 167672 - DNA, 17 bp, Arabidopsis thaliana
tttcttctaacgtgcct

SEQ ID NO: 167673 - DNA, 17 bp, Arabidopsis thaliana
tttcttctaacttggct

SEQ ID NO: 167674 - DNA, 17 bp, Arabidopsis thaliana
tttcttctccagtcaac

SEQ ID NO: 167675 - DNA, 17 bp, Arabidopsis thaliana
tttcttctcctttgttc

SEQ ID NO: 167676 - DNA, 17 bp, Arabidopsis thaliana
tttcttctccttttgga

SEQ ID NO: 167677 - DNA, 17 bp, Arabidopsis thaliana
tttcttctctacaattg

SEQ ID NO: 167678 - DNA, 17 bp, Arabidopsis thaliana
tttcttctctgggacga

SEQ ID NO: 167679 - DNA, 17 bp, Arabidopsis thaliana
tttcttctggccatttg

SEQ ID NO: 167680 - DNA, 17 bp, Arabidopsis thaliana
tttcttctggttcgttc

SEQ ID NO: 167681 - DNA, 17 bp, Arabidopsis thaliana
tttcttcttatcaaggg

SEQ ID NO: 167682 - DNA, 17 bp, Arabidopsis thaliana
tttcttcttccggttcg

SEQ ID NO: 167683 - DNA, 17 bp, Arabidopsis thaliana
tttcttcttcgcactga

SEQ ID NO: 167684 - DNA, 17 bp, Arabidopsis thaliana
tttcttcttcgcagaaa

SEQ ID NO: 167685 - DNA, 17 bp, Arabidopsis thaliana
tttcttcttcttcctcg

SEQ ID NO: 167686 - DNA, 17 bp, Arabidopsis thaliana
tttcttgaaactctagc

SEQ ID NO: 167687 - DNA, 17 bp, Arabidopsis thaliana
tttcttgaagttccaga

SEQ ID NO: 167688 - DNA, 17 bp, Arabidopsis thaliana
tttcttgaccggatttg

SEQ ID NO: 167689 - DNA, 17 bp, Arabidopsis thaliana
tttcttgaccttgcaag

SEQ ID NO: 167690 - DNA, 17 bp, Arabidopsis thaliana
tttcttgaccttgtaag

SEQ ID NO: 167691 - DNA, 17 bp, Arabidopsis thaliana
tttcttgactctagtcc

SEQ ID NO: 167692 - DNA, 17 bp, Arabidopsis thaliana
tttcttgacttgatcgg

SEQ ID NO: 167693 - DNA, 17 bp, Arabidopsis thaliana
tttcttgaggagcacgt

SEQ ID NO: 167694 - DNA, 17 bp, Arabidopsis thaliana
tttcttgattccatggg

SEQ ID NO: 167695 - DNA, 17 bp, Arabidopsis thaliana
tttcttgctcattctat

SEQ ID NO: 167696 - DNA, 17 bp, Arabidopsis thaliana
tttcttgcttcaggtgt

SEQ ID NO: 167697 - DNA, 17 bp, Arabidopsis thaliana
tttcttggaacgctctt

SEQ ID NO: 167698 - DNA, 17 bp, Arabidopsis thaliana
tttcttggcatgtgata

SEQ ID NO: 167699 - DNA, 17 bp, Arabidopsis thaliana
tttcttggcttctccgg

SEQ ID NO: 167700 - DNA, 17 bp, Arabidopsis thaliana
tttcttgggatgggtcg

SEQ ID NO: 167701 - DNA, 17 bp, Arabidopsis thaliana
tttcttggtgcaggtcg

SEQ ID NO: 167702 - DNA, 17 bp, Arabidopsis thaliana
tttcttgtcatagaccc

SEQ ID NO: 167703 - DNA, 17 bp, Arabidopsis thaliana
tttcttgtcggtctgaa

SEQ ID NO: 167704 - DNA, 17 bp, Arabidopsis thaliana
tttcttgtgccagtaca

SEQ ID NO: 167705 - DNA, 17 bp, Arabidopsis thaliana
tttcttgtggagacgtc

SEQ ID NO: 167706 - DNA, 17 bp, Arabidopsis thaliana
tttcttgtgggagcctt

SEQ ID NO: 167707 - DNA, 17 bp, Arabidopsis thaliana
tttcttgtgtagccacc

SEQ ID NO: 167708 - DNA, 17 bp, Arabidopsis thaliana
tttcttgtgtagccact

SEQ ID NO: 167709 - DNA, 17 bp, Arabidopsis thaliana
tttcttgttatggtatg

SEQ ID NO: 167710 - DNA, 17 bp, Arabidopsis thaliana
tttcttgttgtccgccg

SEQ ID NO: 167711 - DNA, 17 bp, Arabidopsis thaliana
tttctttacacaggtcc

SEQ ID NO: 167712 - DNA, 17 bp, Arabidopsis thaliana
tttctttaccaaccttt

SEQ ID NO: 167713 - DNA, 17 bp, Arabidopsis thaliana
tttctttacccgtcccg

SEQ ID NO: 167714 - DNA, 17 bp, Arabidopsis thaliana
tttctttacctactccc

SEQ ID NO: 167715 - DNA, 17 bp, Arabidopsis thaliana
tttctttactctctgct

SEQ ID NO: 167716 - DNA, 17 bp, Arabidopsis thaliana
tttctttagcgagactg

SEQ ID NO: 167717 - DNA, 17 bp, Arabidopsis thaliana
tttctttataatggaca

SEQ ID NO: 167718 - DNA, 17 bp, Arabidopsis thaliana
tttctttattccgcaga

SEQ ID NO: 167719 - DNA, 17 bp, Arabidopsis thaliana
tttctttcaatgtgttt

SEQ ID NO: 167720 - DNA, 17 bp, Arabidopsis thaliana
tttctttcactttgctg

SEQ ID NO: 167721 - DNA, 17 bp, Arabidopsis thaliana
tttctttcactttgttg

SEQ ID NO: 167722 - DNA, 17 bp, Arabidopsis thaliana
tttctttcatatccatt

SEQ ID NO: 167723 - DNA, 17 bp, Arabidopsis thaliana
tttctttccaaagttgt

SEQ ID NO: 167724 - DNA, 17 bp, Arabidopsis thaliana
tttctttccaagacagt

SEQ ID NO: 167725 - DNA, 17 bp, Arabidopsis thaliana
tttctttcccacaagcg

SEQ ID NO: 167726 - DNA, 17 bp, Arabidopsis thaliana
tttctttccccgtgttg

SEQ ID NO: 167727 - DNA, 17 bp, Arabidopsis thaliana
tttctttcccggctggt

SEQ ID NO: 167728 - DNA, 17 bp, Arabidopsis thaliana
tttctttccctcaggat

SEQ ID NO: 167729 - DNA, 17 bp, Arabidopsis thaliana
tttctttccctcttggc

SEQ ID NO: 167730 - DNA, 17 bp, Arabidopsis thaliana
tttctttccgacaatag

SEQ ID NO: 167731 - DNA, 17 bp, Arabidopsis thaliana
tttctttccgacgacga

SEQ ID NO: 167732 - DNA, 17 bp, Arabidopsis thaliana
tttctttccgacgatag

SEQ ID NO: 167733 - DNA, 17 bp, Arabidopsis thaliana
tttctttcctcaaagta

SEQ ID NO: 167734 - DNA, 17 bp, Arabidopsis thaliana
tttctttcctcagttgt

SEQ ID NO: 167735 - DNA, 17 bp, Arabidopsis thaliana
tttctttcctgacacaa

SEQ ID NO: 167736 - DNA, 17 bp, Arabidopsis thaliana
tttctttcctgttacgc

SEQ ID NO: 167737 - DNA, 17 bp, Arabidopsis thaliana
tttctttcgatgtctac

SEQ ID NO: 167738 - DNA, 17 bp, Arabidopsis thaliana
tttctttcgccaaagct

SEQ ID NO: 167739 - DNA, 17 bp, Arabidopsis thaliana
tttctttcgccacttag

SEQ ID NO: 167740 - DNA, 17 bp, Arabidopsis thaliana
tttctttcgggcatttt

SEQ ID NO: 167741 - DNA, 17 bp, Arabidopsis thaliana
tttctttcgttggaccg

SEQ ID NO: 167742 - DNA, 17 bp, Arabidopsis thaliana
tttctttcgttgtctgt

SEQ ID NO: 167743 - DNA, 17 bp, Arabidopsis thaliana
tttctttctattttttt

SEQ ID NO: 167744 - DNA, 17 bp, Arabidopsis thaliana
tttctttctcacttgag

SEQ ID NO: 167745 - DNA, 17 bp, Arabidopsis thaliana
tttctttctcagggtgt

SEQ ID NO: 167746 - DNA, 17 bp, Arabidopsis thaliana
tttctttctcgccacta

SEQ ID NO: 167747 - DNA, 17 bp, Arabidopsis thaliana
tttctttctctctcgac

SEQ ID NO: 167748 - DNA, 17 bp, Arabidopsis thaliana
tttctttctcttccatc

SEQ ID NO: 167749 - DNA, 17 bp, Arabidopsis thaliana
tttctttctcttgatgt

SEQ ID NO: 167750 - DNA, 17 bp, Arabidopsis thaliana
tttctttctgtcaccac

SEQ ID NO: 167751 - DNA, 17 bp, Arabidopsis thaliana
tttctttcttcagttgt

SEQ ID NO: 167752 - DNA, 17 bp, Arabidopsis thaliana
tttctttcttcctgtag

SEQ ID NO: 167753 - DNA, 17 bp, Arabidopsis thaliana
tttctttcttcgctaaa

SEQ ID NO: 167754 - DNA, 17 bp, Arabidopsis thaliana
tttctttcttcttgtcg

SEQ ID NO: 167755 - DNA, 17 bp, Arabidopsis thaliana
tttctttcttggacaag

SEQ ID NO: 167756 - DNA, 17 bp, Arabidopsis thaliana
tttctttctttcttcag

SEQ ID NO: 167757 - DNA, 17 bp, Arabidopsis thaliana
tttctttgaatcctctc

SEQ ID NO: 167758 - DNA, 17 bp, Arabidopsis thaliana
tttctttgagattcgga

SEQ ID NO: 167759 - DNA, 17 bp, Arabidopsis thaliana
tttctttgatgacccgt

SEQ ID NO: 167760 - DNA, 17 bp, Arabidopsis thaliana
tttctttgccaacgtct

SEQ ID NO: 167761 - DNA, 17 bp, Arabidopsis thaliana
tttctttgcggttgcgg

SEQ ID NO: 167762 - DNA, 17 bp, Arabidopsis thaliana
tttctttgcttccagct

SEQ ID NO: 167763 - DNA, 17 bp, Arabidopsis thaliana
tttctttggaccacatt

SEQ ID NO: 167764 - DNA, 17 bp, Arabidopsis thaliana
tttctttggaggaactg

SEQ ID NO: 167765 - DNA, 17 bp, Arabidopsis thaliana
tttctttggatcaacgg

SEQ ID NO: 167766 - DNA, 17 bp, Arabidopsis thaliana
tttctttgggccacagc

SEQ ID NO: 167767 - DNA, 17 bp, Arabidopsis thaliana
tttctttgggtctcggg

SEQ ID NO: 167768 - DNA, 17 bp, Arabidopsis thaliana
tttctttgtccgcttgg

SEQ ID NO: 167769 - DNA, 17 bp, Arabidopsis thaliana
tttctttgtccgttgct

SEQ ID NO: 167770 - DNA, 17 bp, Arabidopsis thaliana
tttctttgtgatgatgt

SEQ ID NO: 167771 - DNA, 17 bp, Arabidopsis thaliana
tttcttttcaccatcca

SEQ ID NO: 167772 - DNA, 17 bp, Arabidopsis thaliana
tttcttttcagcctttg

SEQ ID NO: 167773 - DNA, 17 bp, Arabidopsis thaliana
tttcttttcatcttggc

SEQ ID NO: 167774 - DNA, 17 bp, Arabidopsis thaliana
tttcttttccaacagct

SEQ ID NO: 167775 - DNA, 17 bp, Arabidopsis thaliana
tttcttttccctctgcc

SEQ ID NO: 167776 - DNA, 17 bp, Arabidopsis thaliana
tttcttttccgacaacg

SEQ ID NO: 167777 - DNA, 17 bp, Arabidopsis thaliana
tttcttttccttctgcg

SEQ ID NO: 167778 - DNA, 17 bp, Arabidopsis thaliana
tttcttttcgccatcta

SEQ ID NO: 167779 - DNA, 17 bp, Arabidopsis thaliana
tttcttttcgctccgta

SEQ ID NO: 167780 - DNA, 17 bp, Arabidopsis thaliana
tttcttttctggtgtac

SEQ ID NO: 167781 - DNA, 17 bp, Arabidopsis thaliana
tttcttttgagaacgga

SEQ ID NO: 167782 - DNA, 17 bp, Arabidopsis thaliana
tttcttttgaggcactt

SEQ ID NO: 167783 - DNA, 17 bp, Arabidopsis thaliana
tttcttttgatccttcg

SEQ ID NO: 167784 - DNA, 17 bp, Arabidopsis thaliana
tttcttttgatctgcat

SEQ ID NO: 167785 - DNA, 17 bp, Arabidopsis thaliana
tttcttttgcccgattc

SEQ ID NO: 167786 - DNA, 17 bp, Arabidopsis thaliana
tttcttttgcgactcaa

SEQ ID NO: 167787 - DNA, 17 bp, Arabidopsis thaliana
tttcttttgctggattc

SEQ ID NO: 167788 - DNA, 17 bp, Arabidopsis thaliana
tttcttttggaagcctc

SEQ ID NO: 167789 - DNA, 17 bp, Arabidopsis thaliana
tttcttttggtccggac

SEQ ID NO: 167790 - DNA, 17 bp, Arabidopsis thaliana
tttcttttggtctccag

SEQ ID NO: 167791 - DNA, 17 bp, Arabidopsis thaliana
tttcttttgtcatttac

SEQ ID NO: 167792 - DNA, 17 bp, Arabidopsis thaliana
tttcttttgtcattttt

SEQ ID NO: 167793 - DNA, 17 bp, Arabidopsis thaliana
tttcttttgtcttgagg

SEQ ID NO: 167794 - DNA, 17 bp, Arabidopsis thaliana
tttcttttgttcgtttg

SEQ ID NO: 167795 - DNA, 17 bp, Arabidopsis thaliana
tttctttttacggactg

SEQ ID NO: 167796 - DNA, 17 bp, Arabidopsis thaliana
tttctttttcaaaccaa

SEQ ID NO: 167797 - DNA, 17 bp, Arabidopsis thaliana
tttctttttctggcgcg

SEQ ID NO: 167798 - DNA, 17 bp, Arabidopsis thaliana
tttctttttgcgcggat

SEQ ID NO: 167799 - DNA, 17 bp, Arabidopsis thaliana
tttctttttggtcccaa

SEQ ID NO: 167800 - DNA, 17 bp, Arabidopsis thaliana
tttcttttttcagaaag

SEQ ID NO: 167801 - DNA, 17 bp, Arabidopsis thaliana
tttcttttttgcggtgc

SEQ ID NO: 167802 - DNA, 17 bp, Arabidopsis thaliana
tttcttttttgggtgcg

SEQ ID NO: 167803 - DNA, 17 bp, Arabidopsis thaliana
tttcttttttgggtgtg

SEQ ID NO: 167804 - DNA, 17 bp, Arabidopsis thaliana
tttgaaaactacaattt

SEQ ID NO: 167805 - DNA, 17 bp, Arabidopsis thaliana
tttgaaaccttggacat

SEQ ID NO: 167806 - DNA, 17 bp, Arabidopsis thaliana
tttgaaacgaccaggga

SEQ ID NO: 167807 - DNA, 17 bp, Arabidopsis thaliana
tttgaaactgcgaatgg

SEQ ID NO: 167808 - DNA, 17 bp, Arabidopsis thaliana
tttgaaagtcccacatc

SEQ ID NO: 167809 - DNA, 17 bp, Arabidopsis thaliana
tttgaaagtctaactgt

SEQ ID NO: 167810 - DNA, 17 bp, Arabidopsis thaliana
tttgaaagttcggcttt

SEQ ID NO: 167811 - DNA, 17 bp, Arabidopsis thaliana
tttgaaagtttccgcct

SEQ ID NO: 167812 - DNA, 17 bp, Arabidopsis thaliana
tttgaaagtttcgggtt

SEQ ID NO: 167813 - DNA, 17 bp, Arabidopsis thaliana
tttgaaatccacagttg

SEQ ID NO: 167814 - DNA, 17 bp, Arabidopsis thaliana
tttgaaatccaggaggt

SEQ ID NO: 167815 - DNA, 17 bp, Arabidopsis thaliana
tttgaaatccgttttgt

SEQ ID NO: 167816 - DNA, 17 bp, Arabidopsis thaliana
tttgaaatctatgaggt

SEQ ID NO: 167817 - DNA, 17 bp, Arabidopsis thaliana
tttgaaattcaagaggt

SEQ ID NO: 167818 - DNA, 17 bp, Arabidopsis thaliana
tttgaacacggcctatg

SEQ ID NO: 167819 - DNA, 17 bp, Arabidopsis thaliana
tttgaacccgggctcag

SEQ ID NO: 167820 - DNA, 17 bp, Arabidopsis thaliana
tttgaaccgaaatatgc

SEQ ID NO: 167821 - DNA, 17 bp, Arabidopsis thaliana
tttgaaccgaaatttgc

SEQ ID NO: 167822 - DNA, 17 bp, Arabidopsis thaliana
tttgaaccgcaccgcac

SEQ ID NO: 167823 - DNA, 17 bp, Arabidopsis thaliana
tttgaaccgcaccgcat

SEQ ID NO: 167824 - DNA, 17 bp, Arabidopsis thaliana
tttgaaccgcactgcat

SEQ ID NO: 167825 - DNA, 17 bp, Arabidopsis thaliana
tttgaaccgcactgtcc

SEQ ID NO: 167826 - DNA, 17 bp, Arabidopsis thaliana
tttgaaccgcttgactc

SEQ ID NO: 167827 - DNA, 17 bp, Arabidopsis thaliana
tttgaaccttgggatgg

SEQ ID NO: 167828 - DNA, 17 bp, Arabidopsis thaliana
tttgaacgactggatga

SEQ ID NO: 167829 - DNA, 17 bp, Arabidopsis thaliana
tttgaacgactggttga

SEQ ID NO: 167830 - DNA, 17 bp, Arabidopsis thaliana
tttgaacgcaagttgcg

SEQ ID NO: 167831 - DNA, 17 bp, Arabidopsis thaliana
tttgaagattttccaga

SEQ ID NO: 167832 - DNA, 17 bp, Arabidopsis thaliana
tttgaaggattttgtga

SEQ ID NO: 167833 - DNA, 17 bp, Arabidopsis thaliana
tttgaagtttaggaccc

SEQ ID NO: 167834 - DNA, 17 bp, Arabidopsis thaliana
tttgaataactagtggc

SEQ ID NO: 167835 - DNA, 17 bp, Arabidopsis thaliana
tttgaataccggaaacg

SEQ ID NO: 167836 - DNA, 17 bp, Arabidopsis thaliana
tttgaatccggcatgcc

SEQ ID NO: 167837 - DNA, 17 bp, Arabidopsis thaliana
tttgaatcgttcgttcg

SEQ ID NO: 167838 - DNA, 17 bp, Arabidopsis thaliana
tttgaatctcgggggtg

SEQ ID NO: 167839 - DNA, 17 bp, Arabidopsis thaliana
tttgaatgattacgacg

SEQ ID NO: 167840 - DNA, 17 bp, Arabidopsis thaliana
tttgaatggttactgcg

SEQ ID NO: 167841 - DNA, 17 bp, Arabidopsis thaliana
tttgaattgttgggctt

SEQ ID NO: 167842 - DNA, 17 bp, Arabidopsis thaliana
tttgacaacctgcacag

SEQ ID NO: 167843 - DNA, 17 bp, Arabidopsis thaliana
tttgacaagggttcgct

SEQ ID NO: 167844 - DNA, 17 bp, Arabidopsis thaliana
tttgacaagtctcaaac

SEQ ID NO: 167845 - DNA, 17 bp, Arabidopsis thaliana
tttgacacgggttcgat

SEQ ID NO: 167846 - DNA, 17 bp, Arabidopsis thaliana
tttgacactgtgggctg

SEQ ID NO: 167847 - DNA, 17 bp, Arabidopsis thaliana
tttgacacttgagatcg

SEQ ID NO: 167848 - DNA, 17 bp, Arabidopsis thaliana
tttgacagtcgatcctt

SEQ ID NO: 167849 - DNA, 17 bp, Arabidopsis thaliana
tttgacatcatcagccg

SEQ ID NO: 167850 - DNA, 17 bp, Arabidopsis thaliana
tttgacatccatgaagt

SEQ ID NO: 167851 - DNA, 17 bp, Arabidopsis thaliana
tttgacatctggcataa

SEQ ID NO: 167852 - DNA, 17 bp, Arabidopsis thaliana
tttgacattgtgggctg

SEQ ID NO: 167853 - DNA, 17 bp, Arabidopsis thaliana
tttgaccaaagacttag

SEQ ID NO: 167854 - DNA, 17 bp, Arabidopsis thaliana
tttgaccaaatagtact

SEQ ID NO: 167855 - DNA, 17 bp, Arabidopsis thaliana
tttgaccagggatcagc

SEQ ID NO: 167856 - DNA, 17 bp, Arabidopsis thaliana
tttgaccagttgaaccg

SEQ ID NO: 167857 - DNA, 17 bp, Arabidopsis thaliana
tttgaccattcacatcg

SEQ ID NO: 167858 - DNA, 17 bp, Arabidopsis thaliana
tttgacccacggcaaat

SEQ ID NO: 167859 - DNA, 17 bp, Arabidopsis thaliana
tttgacccactttgaca

SEQ ID NO: 167860 - DNA, 17 bp, Arabidopsis thaliana
tttgacccatcaactca

SEQ ID NO: 167861 - DNA, 17 bp, Arabidopsis thaliana
tttgacccattttgaca

SEQ ID NO: 167862 - DNA, 17 bp, Arabidopsis thaliana
tttgacccattttgtca

SEQ ID NO: 167863 - DNA, 17 bp, Arabidopsis thaliana
tttgacccgatctacag

SEQ ID NO: 167864 - DNA, 17 bp, Arabidopsis thaliana
tttgacccgcttgatct

SEQ ID NO: 167865 - DNA, 17 bp, Arabidopsis thaliana
tttgacccggatgatgt

SEQ ID NO: 167866 - DNA, 17 bp, Arabidopsis thaliana
tttgaccctgatcagtt

SEQ ID NO: 167867 - DNA, 17 bp, Arabidopsis thaliana
tttgacccttagtagga

SEQ ID NO: 167868 - DNA, 17 bp, Arabidopsis thaliana
tttgaccgaattttggt

SEQ ID NO: 167869 - DNA, 17 bp, Arabidopsis thaliana
tttgaccgagaaccatc

SEQ ID NO: 167870 - DNA, 17 bp, Arabidopsis thaliana
tttgaccgagatctttg

SEQ ID NO: 167871 - DNA, 17 bp, Arabidopsis thaliana
tttgaccgattttgaca

SEQ ID NO: 167872 - DNA, 17 bp, Arabidopsis thaliana
tttgaccgcttagcagt

SEQ ID NO: 167873 - DNA, 17 bp, Arabidopsis thaliana
tttgaccgtatcagacg

SEQ ID NO: 167874 - DNA, 17 bp, Arabidopsis thaliana
tttgaccgtatggacaa

SEQ ID NO: 167875 - DNA, 17 bp, Arabidopsis thaliana
tttgacgaagaaatctc

SEQ ID NO: 167876 - DNA, 17 bp, Arabidopsis thaliana
tttgacgacatctccgc

SEQ ID NO: 167877 - DNA, 17 bp, Arabidopsis thaliana
tttgacgacttctaagt

SEQ ID NO: 167878 - DNA, 17 bp, Arabidopsis thaliana
tttgacgattagcgact

SEQ ID NO: 167879 - DNA, 17 bp, Arabidopsis thaliana
tttgacgcgattcggtt

SEQ ID NO: 167880 - DNA, 17 bp, Arabidopsis thaliana
tttgacggtttagtcgg

SEQ ID NO: 167881 - DNA, 17 bp, Arabidopsis thaliana
tttgacgtagccgataa

SEQ ID NO: 167882 - DNA, 17 bp, Arabidopsis thaliana
tttgacgtctgcctggg

SEQ ID NO: 167883 - DNA, 17 bp, Arabidopsis thaliana
tttgacgtgccggagtg

SEQ ID NO: 167884 - DNA, 17 bp, Arabidopsis thaliana
tttgacgtgctcgatct

SEQ ID NO: 167885 - DNA, 17 bp, Arabidopsis thaliana
tttgactaatcaaacga

SEQ ID NO: 167886 - DNA, 17 bp, Arabidopsis thaliana
tttgactaccgcacgat

SEQ ID NO: 167887 - DNA, 17 bp, Arabidopsis thaliana
tttgactagacggcgtc

SEQ ID NO: 167888 - DNA, 17 bp, Arabidopsis thaliana
tttgactagttactaaa

SEQ ID NO: 167889 - DNA, 17 bp, Arabidopsis thaliana
tttgactatcttggcag

SEQ ID NO: 167890 - DNA, 17 bp, Arabidopsis thaliana
tttgactcatatggact

SEQ ID NO: 167891 - DNA, 17 bp, Arabidopsis thaliana
tttgactcatccgcact

SEQ ID NO: 167892 - DNA, 17 bp, Arabidopsis thaliana
tttgactcctacgttgt

SEQ ID NO: 167893 - DNA, 17 bp, Arabidopsis thaliana
tttgactcggtacagtg

SEQ ID NO: 167894 - DNA, 17 bp, Arabidopsis thaliana
tttgactctcggcaacg

SEQ ID NO: 167895 - DNA, 17 bp, Arabidopsis thaliana
tttgactctggagcatc

SEQ ID NO: 167896 - DNA, 17 bp, Arabidopsis thaliana
tttgactctggaggaac

SEQ ID NO: 167897 - DNA, 17 bp, Arabidopsis thaliana
tttgactgattaacgct

SEQ ID NO: 167898 - DNA, 17 bp, Arabidopsis thaliana
tttgactgctgtggcca

SEQ ID NO: 167899 - DNA, 17 bp, Arabidopsis thaliana
tttgactggtaaaccag

SEQ ID NO: 167900 - DNA, 17 bp, Arabidopsis thaliana
tttgactgtcgctctaa

SEQ ID NO: 167901 - DNA, 17 bp, Arabidopsis thaliana
tttgacttaggccctgt

SEQ ID NO: 167902 - DNA, 17 bp, Arabidopsis thaliana
tttgacttcaacgcctt

SEQ ID NO: 167903 - DNA, 17 bp, Arabidopsis thaliana
tttgactttttcatcgc

SEQ ID NO: 167904 - DNA, 17 bp, Arabidopsis thaliana
tttgagaactaccaatg

SEQ ID NO: 167905 - DNA, 17 bp, Arabidopsis thaliana
tttgagaactttacagt

SEQ ID NO: 167906 - DNA, 17 bp, Arabidopsis thaliana
tttgagaagttgcgaag

SEQ ID NO: 167907 - DNA, 17 bp, Arabidopsis thaliana
tttgagaatgccaattt

SEQ ID NO: 167908 - DNA, 17 bp, Arabidopsis thaliana
tttgagacagagttgga

SEQ ID NO: 167909 - DNA, 17 bp, Arabidopsis thaliana
tttgagaccatgggaag

SEQ ID NO: 167910 - DNA, 17 bp, Arabidopsis thaliana
tttgagacccggggtcc

SEQ ID NO: 167911 - DNA, 17 bp, Arabidopsis thaliana
tttgagacgcatagcca

SEQ ID NO: 167912 - DNA, 17 bp, Arabidopsis thaliana
tttgagacgttgaaaat

SEQ ID NO: 167913 - DNA, 17 bp, Arabidopsis thaliana
tttgagacttggtggtg

SEQ ID NO: 167914 - DNA, 17 bp, Arabidopsis thaliana
tttgagagacaggatcc

SEQ ID NO: 167915 - DNA, 17 bp, Arabidopsis thaliana
tttgagagatgcgcccc

SEQ ID NO: 167916 - DNA, 17 bp, Arabidopsis thaliana
tttgagagcatgcaatg

SEQ ID NO: 167917 - DNA, 17 bp, Arabidopsis thaliana
tttgagagctcgtatca

SEQ ID NO: 167918 - DNA, 17 bp, Arabidopsis thaliana
tttgagaggatttgtga

SEQ ID NO: 167919 - DNA, 17 bp, Arabidopsis thaliana
tttgagagtttgtcaag

SEQ ID NO: 167920 - DNA, 17 bp, Arabidopsis thaliana
tttgagatggccaagtg

SEQ ID NO: 167921 - DNA, 17 bp, Arabidopsis thaliana
tttgagattcgcgttga

SEQ ID NO: 167922 - DNA, 17 bp, Arabidopsis thaliana
tttgagattcggatcgg

SEQ ID NO: 167923 - DNA, 17 bp, Arabidopsis thaliana
tttgagattgtgggatt

SEQ ID NO: 167924 - DNA, 17 bp, Arabidopsis thaliana
tttgagcaagctgagtt

SEQ ID NO: 167925 - DNA, 17 bp, Arabidopsis thaliana
tttgagcagtccgatgg

SEQ ID NO: 167926 - DNA, 17 bp, Arabidopsis thaliana
tttgagccaagtggcca

SEQ ID NO: 167927 - DNA, 17 bp, Arabidopsis thaliana
tttgagcccagacattt

SEQ ID NO: 167928 - DNA, 17 bp, Arabidopsis thaliana
tttgagccgacaagtga

SEQ ID NO: 167929 - DNA, 17 bp, Arabidopsis thaliana
tttgagccgacactctt

SEQ ID NO: 167930 - DNA, 17 bp, Arabidopsis thaliana
tttgagcctccaatgtt

SEQ ID NO: 167931 - DNA, 17 bp, Arabidopsis thaliana
tttgagcgctgtaacaa

SEQ ID NO: 167932 - DNA, 17 bp, Arabidopsis thaliana
tttgagctctatctggc

SEQ ID NO: 167933 - DNA, 17 bp, Arabidopsis thaliana
tttgagctctcagaacc

SEQ ID NO: 167934 - DNA, 17 bp, Arabidopsis thaliana
tttgagctctcagtcta

SEQ ID NO: 167935 - DNA, 17 bp, Arabidopsis thaliana
tttgagcttgagatggt

SEQ ID NO: 167936 - DNA, 17 bp, Arabidopsis thaliana
tttgaggaccgattgcc

SEQ ID NO: 167937 - DNA, 17 bp, Arabidopsis thaliana
tttgaggaggccattcg

SEQ ID NO: 167938 - DNA, 17 bp, Arabidopsis thaliana
tttgaggatagaccgga

SEQ ID NO: 167939 - DNA, 17 bp, Arabidopsis thaliana
tttgaggcacttgtcag

SEQ ID NO: 167940 - DNA, 17 bp, Arabidopsis thaliana
tttgaggcactttccaa

SEQ ID NO: 167941 - DNA, 17 bp, Arabidopsis thaliana
tttgaggccaatgctct

SEQ ID NO: 167942 - DNA, 17 bp, Arabidopsis thaliana
tttgaggcccaaaagtg

SEQ ID NO: 167943 - DNA, 17 bp, Arabidopsis thaliana
tttgaggctgtcctaat

SEQ ID NO: 167944 - DNA, 17 bp, Arabidopsis thaliana
tttgagggcacgtctgc

SEQ ID NO: 167945 - DNA, 17 bp, Arabidopsis thaliana
tttgagggctgggctcg

SEQ ID NO: 167946 - DNA, 17 bp, Arabidopsis thaliana
tttgaggggacgtctgg

SEQ ID NO: 167947 - DNA, 17 bp, Arabidopsis thaliana
tttgaggggtcttcgct

SEQ ID NO: 167948 - DNA, 17 bp, Arabidopsis thaliana
tttgagggtgtcgatcc

SEQ ID NO: 167949 - DNA, 17 bp, Arabidopsis thaliana
tttgaggttaaggtggg

SEQ ID NO: 167950 - DNA, 17 bp, Arabidopsis thaliana
tttgagtcacgggcttg

SEQ ID NO: 167951 - DNA, 17 bp, Arabidopsis thaliana
tttgagtctgcagttcc

SEQ ID NO: 167952 - DNA, 17 bp, Arabidopsis thaliana
tttgagtctggcagtga

SEQ ID NO: 167953 - DNA, 17 bp, Arabidopsis thaliana
tttgagtcttgcatgac

SEQ ID NO: 167954 - DNA, 17 bp, Arabidopsis thaliana
tttgagtgacgcttgga

SEQ ID NO: 167955 - DNA, 17 bp, Arabidopsis thaliana
tttgagtgcggtttatg

SEQ ID NO: 167956 - DNA, 17 bp, Arabidopsis thaliana
tttgagtgcggttttgg

SEQ ID NO: 167957 - DNA, 17 bp, Arabidopsis thaliana
tttgagttcacgttcca

SEQ ID NO: 167958 - DNA, 17 bp, Arabidopsis thaliana
tttgagtttctgaccaa

SEQ ID NO: 167959 - DNA, 17 bp, Arabidopsis thaliana
tttgataactgagttca

SEQ ID NO: 167960 - DNA, 17 bp, Arabidopsis thaliana
tttgatactgtgactca

SEQ ID NO: 167961 - DNA, 17 bp, Arabidopsis thaliana
tttgataggacgggttt

SEQ ID NO: 167962 - DNA, 17 bp, Arabidopsis thaliana
tttgatatggaccatag

SEQ ID NO: 167963 - DNA, 17 bp, Arabidopsis thaliana
tttgatatgtccgagtg

SEQ ID NO: 167964 - DNA, 17 bp, Arabidopsis thaliana
tttgatatgtccgtggt

SEQ ID NO: 167965 - DNA, 17 bp, Arabidopsis thaliana
tttgatcaaagctaagc

SEQ ID NO: 167966 - DNA, 17 bp, Arabidopsis thaliana
tttgatcaagggttgtt

SEQ ID NO: 167967 - DNA, 17 bp, Arabidopsis thaliana
tttgatcacagggactg

SEQ ID NO: 167968 - DNA, 17 bp, Arabidopsis thaliana
tttgatcagtcttgagg

SEQ ID NO: 167969 - DNA, 17 bp, Arabidopsis thaliana
tttgatcatcgagagtt

SEQ ID NO: 167970 - DNA, 17 bp, Arabidopsis thaliana
tttgatcccgctggagg

SEQ ID NO: 167971 - DNA, 17 bp, Arabidopsis thaliana
tttgatccgctatgctt

SEQ ID NO: 167972 - DNA, 17 bp, Arabidopsis thaliana
tttgatccgtctgatat

SEQ ID NO: 167973 - DNA, 17 bp, Arabidopsis thaliana
tttgatccttccatccc

SEQ ID NO: 167974 - DNA, 17 bp, Arabidopsis thaliana
tttgatccttcgatgcc

SEQ ID NO: 167975 - DNA, 17 bp, Arabidopsis thaliana
tttgatccttcgatgtc

SEQ ID NO: 167976 - DNA, 17 bp, Arabidopsis thaliana
tttgatccttcgttgtc

SEQ ID NO: 167977 - DNA, 17 bp, Arabidopsis thaliana
tttgatccttctatgtc

SEQ ID NO: 167978 - DNA, 17 bp, Arabidopsis thaliana
tttgatcgagatttcgc

SEQ ID NO: 167979 - DNA, 17 bp, Arabidopsis thaliana
tttgatcgctaagttgt

SEQ ID NO: 167980 - DNA, 17 bp, Arabidopsis thaliana
tttgatcgctatgcctc

SEQ ID NO: 167981 - DNA, 17 bp, Arabidopsis thaliana
tttgatcgctgtcgctg

SEQ ID NO: 167982 - DNA, 17 bp, Arabidopsis thaliana
tttgatcgctgtcgtgg

SEQ ID NO: 167983 - DNA, 17 bp, Arabidopsis thaliana
tttgatcgctgtcgttg

SEQ ID NO: 167984 - DNA, 17 bp, Arabidopsis thaliana
tttgatcgtaaaaactt

SEQ ID NO: 167985 - DNA, 17 bp, Arabidopsis thaliana
tttgatctcgagttgga

SEQ ID NO: 167986 - DNA, 17 bp, Arabidopsis thaliana
tttgatctgctctgctt

SEQ ID NO: 167987 - DNA, 17 bp, Arabidopsis thaliana
tttgatgaagacttcac

SEQ ID NO: 167988 - DNA, 17 bp, Arabidopsis thaliana
tttgatgacccgtcttc

SEQ ID NO: 167989 - DNA, 17 bp, Arabidopsis thaliana
tttgatgacccgtcttt

SEQ ID NO: 167990 - DNA, 17 bp, Arabidopsis thaliana
tttgatgagaaaccgtc

SEQ ID NO: 167991 - DNA, 17 bp, Arabidopsis thaliana
tttgatgatggagctcc

SEQ ID NO: 167992 - DNA, 17 bp, Arabidopsis thaliana
tttgatgatgtgaggat

SEQ ID NO: 167993 - DNA, 17 bp, Arabidopsis thaliana
tttgatgattctggacc

SEQ ID NO: 167994 - DNA, 17 bp, Arabidopsis thaliana
tttgatgcacggaggga

SEQ ID NO: 167995 - DNA, 17 bp, Arabidopsis thaliana
tttgatgcacgttcgga

SEQ ID NO: 167996 - DNA, 17 bp, Arabidopsis thaliana
tttgatggaccaagacg

SEQ ID NO: 167997 - DNA, 17 bp, Arabidopsis thaliana
tttgatggagaagacca

SEQ ID NO: 167998 - DNA, 17 bp, Arabidopsis thaliana
tttgatggagatcagcg

SEQ ID NO: 167999 - DNA, 17 bp, Arabidopsis thaliana
tttgatggcccgtctgc

SEQ ID NO: 168000 - DNA, 17 bp, Arabidopsis thaliana
tttgatgggagtccggc

SEQ ID NO: 168001 - DNA, 17 bp, Arabidopsis thaliana
tttgatggtacagtccc

SEQ ID NO: 168002 - DNA, 17 bp, Arabidopsis thaliana
tttgatggtgtagtcgc

SEQ ID NO: 168003 - DNA, 17 bp, Arabidopsis thaliana
tttgatggtttacccga

SEQ ID NO: 168004 - DNA, 17 bp, Arabidopsis thaliana
tttgatgtagcgcagct

SEQ ID NO: 168005 - DNA, 17 bp, Arabidopsis thaliana
tttgatgtctcaccgcc

SEQ ID NO: 168006 - DNA, 17 bp, Arabidopsis thaliana
tttgatgttctgggccg

SEQ ID NO: 168007 - DNA, 17 bp, Arabidopsis thaliana
tttgatgttgtagccga

SEQ ID NO: 168008 - DNA, 17 bp, Arabidopsis thaliana
tttgattatcggttctt

SEQ ID NO: 168009 - DNA, 17 bp, Arabidopsis thaliana
tttgattatggatcggg

SEQ ID NO: 168010 - DNA, 17 bp, Arabidopsis thaliana
tttgattcattctgtga

SEQ ID NO: 168011 - DNA, 17 bp, Arabidopsis thaliana
tttgattcattctgtgg

SEQ ID NO: 168012 - DNA, 17 bp, Arabidopsis thaliana
tttgattccgcttttct

SEQ ID NO: 168013 - DNA, 17 bp, Arabidopsis thaliana
tttgattcgatcactaa

SEQ ID NO: 168014 - DNA, 17 bp, Arabidopsis thaliana
tttgattcgcaaggttt

SEQ ID NO: 168015 - DNA, 17 bp, Arabidopsis thaliana
tttgattcttcctgttg

SEQ ID NO: 168016 - DNA, 17 bp, Arabidopsis thaliana
tttgattgaagggagct

SEQ ID NO: 168017 - DNA, 17 bp, Arabidopsis thaliana
tttgattgtaggtttgt

SEQ ID NO: 168018 - DNA, 17 bp, Arabidopsis thaliana
tttgattgtgcgtttgt

SEQ ID NO: 168019 - DNA, 17 bp, Arabidopsis thaliana
tttgattgtgtgttttg

SEQ ID NO: 168020 - DNA, 17 bp, Arabidopsis thaliana
tttgatttaatcgggac

SEQ ID NO: 168021 - DNA, 17 bp, Arabidopsis thaliana
tttgatttcgcctttga

SEQ ID NO: 168022 - DNA, 17 bp, Arabidopsis thaliana
tttgatttcttcagggg

SEQ ID NO: 168023 - DNA, 17 bp, Arabidopsis thaliana
tttgatttcttcagtga

SEQ ID NO: 168024 - DNA, 17 bp, Arabidopsis thaliana
tttgattttcgcgtgaa

SEQ ID NO: 168025 - DNA, 17 bp, Arabidopsis thaliana
tttgattttggcaaaac

SEQ ID NO: 168026 - DNA, 17 bp, Arabidopsis thaliana
tttgattttgtgggccg

SEQ ID NO: 168027 - DNA, 17 bp, Arabidopsis thaliana
tttgcaaaactgccctt

SEQ ID NO: 168028 - DNA, 17 bp, Arabidopsis thaliana
tttgcaaacacaaaccc

SEQ ID NO: 168029 - DNA, 17 bp, Arabidopsis thaliana
tttgcaaacttgaccga

SEQ ID NO: 168030 - DNA, 17 bp, Arabidopsis thaliana
tttgcaaatgagtctaa

SEQ ID NO: 168031 - DNA, 17 bp, Arabidopsis thaliana
tttgcaaatggatcgca

SEQ ID NO: 168032 - DNA, 17 bp, Arabidopsis thaliana
tttgcaactcttcttca

SEQ ID NO: 168033 - DNA, 17 bp, Arabidopsis thaliana
tttgcaacttatttgcg

SEQ ID NO: 168034 - DNA, 17 bp, Arabidopsis thaliana
tttgcaactttacccac

SEQ ID NO: 168035 - DNA, 17 bp, Arabidopsis thaliana
tttgcaactttaccctc

SEQ ID NO: 168036 - DNA, 17 bp, Arabidopsis thaliana
tttgcaagactatcggt

SEQ ID NO: 168037 - DNA, 17 bp, Arabidopsis thaliana
tttgcaaggggctgagt

SEQ ID NO: 168038 - DNA, 17 bp, Arabidopsis thaliana
tttgcaagtttaccctc

SEQ ID NO: 168039 - DNA, 17 bp, Arabidopsis thaliana
tttgcaatcgtcttcaa

SEQ ID NO: 168040 - DNA, 17 bp, Arabidopsis thaliana
tttgcaattgacccttt

SEQ ID NO: 168041 - DNA, 17 bp, Arabidopsis thaliana
tttgcaatttgagtcat

SEQ ID NO: 168042 - DNA, 17 bp, Arabidopsis thaliana
tttgcacaagtgatatc

SEQ ID NO: 168043 - DNA, 17 bp, Arabidopsis thaliana
tttgcacattcttcatc

SEQ ID NO: 168044 - DNA, 17 bp, Arabidopsis thaliana
tttgcaccaaccttcta

SEQ ID NO: 168045 - DNA, 17 bp, Arabidopsis thaliana
tttgcaccagttccggg

SEQ ID NO: 168046 - DNA, 17 bp, Arabidopsis thaliana
tttgcacccatcgaaag

SEQ ID NO: 168047 - DNA, 17 bp, Arabidopsis thaliana
tttgcacctaatccctt

SEQ ID NO: 168048 - DNA, 17 bp, Arabidopsis thaliana
tttgcacgtctgcctgg

SEQ ID NO: 168049 - DNA, 17 bp, Arabidopsis thaliana
tttgcacgtttattgga

SEQ ID NO: 168050 - DNA, 17 bp, Arabidopsis thaliana
tttgcactggtgacatg

SEQ ID NO: 168051 - DNA, 17 bp, Arabidopsis thaliana
tttgcagaagtgacgct

SEQ ID NO: 168052 - DNA, 17 bp, Arabidopsis thaliana
tttgcagaccagtcttt

SEQ ID NO: 168053 - DNA, 17 bp, Arabidopsis thaliana
tttgcagacgacttaaa

SEQ ID NO: 168054 - DNA, 17 bp, Arabidopsis thaliana
tttgcagagacgcggcg

SEQ ID NO: 168055 - DNA, 17 bp, Arabidopsis thaliana
tttgcagagagccttcc

SEQ ID NO: 168056 - DNA, 17 bp, Arabidopsis thaliana
tttgcagagatgaggca

SEQ ID NO: 168057 - DNA, 17 bp, Arabidopsis thaliana
tttgcagatctgttttt

SEQ ID NO: 168058 - DNA, 17 bp, Arabidopsis thaliana
tttgcagatggccgcat

SEQ ID NO: 168059 - DNA, 17 bp, Arabidopsis thaliana
tttgcagatggtccgct

SEQ ID NO: 168060 - DNA, 17 bp, Arabidopsis thaliana
tttgcagatgtcgtcta

SEQ ID NO: 168061 - DNA, 17 bp, Arabidopsis thaliana
tttgcagattagttgtc

SEQ ID NO: 168062 - DNA, 17 bp, Arabidopsis thaliana
tttgcagcctactttga

SEQ ID NO: 168063 - DNA, 17 bp, Arabidopsis thaliana
tttgcagcgaccgccgc

SEQ ID NO: 168064 - DNA, 17 bp, Arabidopsis thaliana
tttgcagcgatactgac

SEQ ID NO: 168065 - DNA, 17 bp, Arabidopsis thaliana
tttgcagcggaattggc

SEQ ID NO: 168066 - DNA, 17 bp, Arabidopsis thaliana
tttgcagcggcagcacc

SEQ ID NO: 168067 - DNA, 17 bp, Arabidopsis thaliana
tttgcaggctcagaatt

SEQ ID NO: 168068 - DNA, 17 bp, Arabidopsis thaliana
tttgcaggctcttcgtg

SEQ ID NO: 168069 - DNA, 17 bp, Arabidopsis thaliana
tttgcaggtcccgacgc

SEQ ID NO: 168070 - DNA, 17 bp, Arabidopsis thaliana
tttgcaggtcgggttcg

SEQ ID NO: 168071 - DNA, 17 bp, Arabidopsis thaliana
tttgcaggtggtagagt

SEQ ID NO: 168072 - DNA, 17 bp, Arabidopsis thaliana
tttgcagtaatcgcctt

SEQ ID NO: 168073 - DNA, 17 bp, Arabidopsis thaliana
tttgcagtccgacacac

SEQ ID NO: 168074 - DNA, 17 bp, Arabidopsis thaliana
tttgcagtggattcgac

SEQ ID NO: 168075 - DNA, 17 bp, Arabidopsis thaliana
tttgcagttgcagatgg

SEQ ID NO: 168076 - DNA, 17 bp, Arabidopsis thaliana
tttgcatgcctgtcggg

SEQ ID NO: 168077 - DNA, 17 bp, Arabidopsis thaliana
tttgcatgctttgatct

SEQ ID NO: 168078 - DNA, 17 bp, Arabidopsis thaliana
tttgcatggacattttt

SEQ ID NO: 168079 - DNA, 17 bp, Arabidopsis thaliana
tttgcatgtcgctggat

SEQ ID NO: 168080 - DNA, 17 bp, Arabidopsis thaliana
tttgcatgtgacgcagt

SEQ ID NO: 168081 - DNA, 17 bp, Arabidopsis thaliana
tttgcatgtggttctca

SEQ ID NO: 168082 - DNA, 17 bp, Arabidopsis thaliana
tttgcatgttgtcaatg

SEQ ID NO: 168083 - DNA, 17 bp, Arabidopsis thaliana
tttgcattcattgcttc

SEQ ID NO: 168084 - DNA, 17 bp, Arabidopsis thaliana
tttgcattgccgacgtc

SEQ ID NO: 168085 - DNA, 17 bp, Arabidopsis thaliana
tttgcattttcgtgatt

SEQ ID NO: 168086 - DNA, 17 bp, Arabidopsis thaliana
tttgcattttcgtgcgc

SEQ ID NO: 168087 - DNA, 17 bp, Arabidopsis thaliana
tttgcattttcgtgtgc

SEQ ID NO: 168088 - DNA, 17 bp, Arabidopsis thaliana
tttgccaacgaaatgat

SEQ ID NO: 168089 - DNA, 17 bp, Arabidopsis thaliana
tttgccaaggatgtttt

SEQ ID NO: 168090 - DNA, 17 bp, Arabidopsis thaliana
tttgccacaaaagtctg

SEQ ID NO: 168091 - DNA, 17 bp, Arabidopsis thaliana
tttgccacaactgtctc

SEQ ID NO: 168092 - DNA, 17 bp, Arabidopsis thaliana
tttgccacttcttctcg

SEQ ID NO: 168093 - DNA, 17 bp, Arabidopsis thaliana
tttgccacttgcgctta

SEQ ID NO: 168094 - DNA, 17 bp, Arabidopsis thaliana
tttgccagaagttttgc

SEQ ID NO: 168095 - DNA, 17 bp, Arabidopsis thaliana
tttgccagacaactacc

SEQ ID NO: 168096 - DNA, 17 bp, Arabidopsis thaliana
tttgccagacaactact

SEQ ID NO: 168097 - DNA, 17 bp, Arabidopsis thaliana
tttgccagacagtgcca

SEQ ID NO: 168098 - DNA, 17 bp, Arabidopsis thaliana
tttgccatggttcaaag

SEQ ID NO: 168099 - DNA, 17 bp, Arabidopsis thaliana
tttgccatgtcgagttt

SEQ ID NO: 168100 - DNA, 17 bp, Arabidopsis thaliana
tttgccattctcgtgcc

SEQ ID NO: 168101 - DNA, 17 bp, Arabidopsis thaliana
tttgccattctttagcg

SEQ ID NO: 168102 - DNA, 17 bp, Arabidopsis thaliana
tttgccatttgagtcat

SEQ ID NO: 168103 - DNA, 17 bp, Arabidopsis thaliana
tttgccattttttagcg

SEQ ID NO: 168104 - DNA, 17 bp, Arabidopsis thaliana
tttgcccaacgtgtagt

SEQ ID NO: 168105 - DNA, 17 bp, Arabidopsis thaliana
tttgcccaagtccatca

SEQ ID NO: 168106 - DNA, 17 bp, Arabidopsis thaliana
tttgcccccttcctctt

SEQ ID NO: 168107 - DNA, 17 bp, Arabidopsis thaliana
tttgcccggccgggctc

SEQ ID NO: 168108 - DNA, 17 bp, Arabidopsis thaliana
tttgccctactagcgga

SEQ ID NO: 168109 - DNA, 17 bp, Arabidopsis thaliana
tttgccctactagtgga

SEQ ID NO: 168110 - DNA, 17 bp, Arabidopsis thaliana
tttgccctactctgcca

SEQ ID NO: 168111 - DNA, 17 bp, Arabidopsis thaliana
tttgcccttgcggtctg

SEQ ID NO: 168112 - DNA, 17 bp, Arabidopsis thaliana
tttgcccttgctgctac

SEQ ID NO: 168113 - DNA, 17 bp, Arabidopsis thaliana
tttgccgaagcttctcg

SEQ ID NO: 168114 - DNA, 17 bp, Arabidopsis thaliana
tttgccgagggcacgtc

SEQ ID NO: 168115 - DNA, 17 bp, Arabidopsis thaliana
tttgccgatagcgagac

SEQ ID NO: 168116 - DNA, 17 bp, Arabidopsis thaliana
tttgccgcagacttgtt

SEQ ID NO: 168117 - DNA, 17 bp, Arabidopsis thaliana
tttgccgccgatgagat

SEQ ID NO: 168118 - DNA, 17 bp, Arabidopsis thaliana
tttgccgccgccgttta

SEQ ID NO: 168119 - DNA, 17 bp, Arabidopsis thaliana
tttgccgctttgcaatt

SEQ ID NO: 168120 - DNA, 17 bp, Arabidopsis thaliana
tttgccgctttttctat

SEQ ID NO: 168121 - DNA, 17 bp, Arabidopsis thaliana
tttgccgctttttctgt

SEQ ID NO: 168122 - DNA, 17 bp, Arabidopsis thaliana
tttgccggatctggtga

SEQ ID NO: 168123 - DNA, 17 bp, Arabidopsis thaliana
tttgccggctcgtcaac

SEQ ID NO: 168124 - DNA, 17 bp, Arabidopsis thaliana
tttgccggtatcgtcct

SEQ ID NO: 168125 - DNA, 17 bp, Arabidopsis thaliana
tttgccgtctctgatac

SEQ ID NO: 168126 - DNA, 17 bp, Arabidopsis thaliana
tttgccgtctgaactat

SEQ ID NO: 168127 - DNA, 17 bp, Arabidopsis thaliana
tttgccgtctgtaagct

SEQ ID NO: 168128 - DNA, 17 bp, Arabidopsis thaliana
tttgccgtctttgttgt

SEQ ID NO: 168129 - DNA, 17 bp, Arabidopsis thaliana
tttgccgtgggtcccac

SEQ ID NO: 168130 - DNA, 17 bp, Arabidopsis thaliana
tttgccgtgtaggagaa

SEQ ID NO: 168131 - DNA, 17 bp, Arabidopsis thaliana
tttgccgttcgatttcg

SEQ ID NO: 168132 - DNA, 17 bp, Arabidopsis thaliana
tttgcctaccaatgcga

SEQ ID NO: 168133 - DNA, 17 bp, Arabidopsis thaliana
tttgcctaccatggtgg

SEQ ID NO: 168134 - DNA, 17 bp, Arabidopsis thaliana
tttgcctactcatttgc

SEQ ID NO: 168135 - DNA, 17 bp, Arabidopsis thaliana
tttgcctacttcaggtt

SEQ ID NO: 168136 - DNA, 17 bp, Arabidopsis thaliana
tttgcctaggcctgtgt

SEQ ID NO: 168137 - DNA, 17 bp, Arabidopsis thaliana
tttgcctcagtcgccac

SEQ ID NO: 168138 - DNA, 17 bp, Arabidopsis thaliana
tttgcctccatgctgcg

SEQ ID NO: 168139 - DNA, 17 bp, Arabidopsis thaliana
tttgcctcggatttgct

SEQ ID NO: 168140 - DNA, 17 bp, Arabidopsis thaliana
tttgcctcggctcaaga

SEQ ID NO: 168141 - DNA, 17 bp, Arabidopsis thaliana
tttgcctcggtttgcgt

SEQ ID NO: 168142 - DNA, 17 bp, Arabidopsis thaliana
tttgcctctaagctctg

SEQ ID NO: 168143 - DNA, 17 bp, Arabidopsis thaliana
tttgcctctactttgtg

SEQ ID NO: 168144 - DNA, 17 bp, Arabidopsis thaliana
tttgcctctgaatctgg

SEQ ID NO: 168145 - DNA, 17 bp, Arabidopsis thaliana
tttgcctcttcccttgc

SEQ ID NO: 168146 - DNA, 17 bp, Arabidopsis thaliana
tttgcctgatatatgtt

SEQ ID NO: 168147 - DNA, 17 bp, Arabidopsis thaliana
tttgcctgtcgctggcg

SEQ ID NO: 168148 - DNA, 17 bp, Arabidopsis thaliana
tttgcctgtcgctggtg

SEQ ID NO: 168149 - DNA, 17 bp, Arabidopsis thaliana
tttgccttccgacattg

SEQ ID NO: 168150 - DNA, 17 bp, Arabidopsis thaliana
tttgccttgaggcacgg

SEQ ID NO: 168151 - DNA, 17 bp, Arabidopsis thaliana
tttgcctttccgacaag

SEQ ID NO: 168152 - DNA, 17 bp, Arabidopsis thaliana
tttgcgaagaccttgag

SEQ ID NO: 168153 - DNA, 17 bp, Arabidopsis thaliana
tttgcgaagtccactaa

SEQ ID NO: 168154 - DNA, 17 bp, Arabidopsis thaliana
tttgcgaagtttgtcag

SEQ ID NO: 168155 - DNA, 17 bp, Arabidopsis thaliana
tttgcgaattggttgtg

SEQ ID NO: 168156 - DNA, 17 bp, Arabidopsis thaliana
tttgcgacaccgaaaaa

SEQ ID NO: 168157 - DNA, 17 bp, Arabidopsis thaliana
tttgcgacatttgccac

SEQ ID NO: 168158 - DNA, 17 bp, Arabidopsis thaliana
tttgcgacccatttgca

SEQ ID NO: 168159 - DNA, 17 bp, Arabidopsis thaliana
tttgcgaccgcaaataa

SEQ ID NO: 168160 - DNA, 17 bp, Arabidopsis thaliana
tttgcgacctgggttcg

SEQ ID NO: 168161 - DNA, 17 bp, Arabidopsis thaliana
tttgcgacgaatttttg

SEQ ID NO: 168162 - DNA, 17 bp, Arabidopsis thaliana
tttgcgacgacagcaga

SEQ ID NO: 168163 - DNA, 17 bp, Arabidopsis thaliana
tttgcgacgacattcag

SEQ ID NO: 168164 - DNA, 17 bp, Arabidopsis thaliana
tttgcgacggatttgcg

SEQ ID NO: 168165 - DNA, 17 bp, Arabidopsis thaliana
tttgcgacgtcgcgaga

SEQ ID NO: 168166 - DNA, 17 bp, Arabidopsis thaliana
tttgcgacgttgctttt

SEQ ID NO: 168167 - DNA, 17 bp, Arabidopsis thaliana
tttgcgactcaacggct

SEQ ID NO: 168168 - DNA, 17 bp, Arabidopsis thaliana
tttgcgagaaaataacg

SEQ ID NO: 168169 - DNA, 17 bp, Arabidopsis thaliana
tttgcgagagatttacg

SEQ ID NO: 168170 - DNA, 17 bp, Arabidopsis thaliana
tttgcgagggaggctgg

SEQ ID NO: 168171 - DNA, 17 bp, Arabidopsis thaliana
tttgcgaggttctgttt

SEQ ID NO: 168172 - DNA, 17 bp, Arabidopsis thaliana
tttgcgagtagtgacta

SEQ ID NO: 168173 - DNA, 17 bp, Arabidopsis thaliana
tttgcgatccagcatgg

SEQ ID NO: 168174 - DNA, 17 bp, Arabidopsis thaliana
tttgcgatggaaaaggt

SEQ ID NO: 168175 - DNA, 17 bp, Arabidopsis thaliana
tttgcgatggatttgcc

SEQ ID NO: 168176 - DNA, 17 bp, Arabidopsis thaliana
tttgcgatggatttgct

SEQ ID NO: 168177 - DNA, 17 bp, Arabidopsis thaliana
tttgcgatgtaacagat

SEQ ID NO: 168178 - DNA, 17 bp, Arabidopsis thaliana
tttgcgattaaatcccg

SEQ ID NO: 168179 - DNA, 17 bp, Arabidopsis thaliana
tttgcgattagcgtgat

SEQ ID NO: 168180 - DNA, 17 bp, Arabidopsis thaliana
tttgcgattcagatctg

SEQ ID NO: 168181 - DNA, 17 bp, Arabidopsis thaliana
tttgcgcagcatttttc

SEQ ID NO: 168182 - DNA, 17 bp, Arabidopsis thaliana
tttgcgccgattctgtc

SEQ ID NO: 168183 - DNA, 17 bp, Arabidopsis thaliana
tttgcgcgattgattgc

SEQ ID NO: 168184 - DNA, 17 bp, Arabidopsis thaliana
tttgcgcggatgaacag

SEQ ID NO: 168185 - DNA, 17 bp, Arabidopsis thaliana
tttgcgctctacaagat

SEQ ID NO: 168186 - DNA, 17 bp, Arabidopsis thaliana
tttgcgcttcacaagac

SEQ ID NO: 168187 - DNA, 17 bp, Arabidopsis thaliana
tttgcgcttcgagagat

SEQ ID NO: 168188 - DNA, 17 bp, Arabidopsis thaliana
tttgcgcttcgagaggt

SEQ ID NO: 168189 - DNA, 17 bp, Arabidopsis thaliana
tttgcggaccggtctgc

SEQ ID NO: 168190 - DNA, 17 bp, Arabidopsis thaliana
tttgcggcatgcagtct

SEQ ID NO: 168191 - DNA, 17 bp, Arabidopsis thaliana
tttgcggccgttagtgg

SEQ ID NO: 168192 - DNA, 17 bp, Arabidopsis thaliana
tttgcggctaaagtctc

SEQ ID NO: 168193 - DNA, 17 bp, Arabidopsis thaliana
tttgcggctgttgattg

SEQ ID NO: 168194 - DNA, 17 bp, Arabidopsis thaliana
tttgcgggaaaatcacg

SEQ ID NO: 168195 - DNA, 17 bp, Arabidopsis thaliana
tttgcgggacgggttgg

SEQ ID NO: 168196 - DNA, 17 bp, Arabidopsis thaliana
tttgcgggacgggtttg

SEQ ID NO: 168197 - DNA, 17 bp, Arabidopsis thaliana
tttgcgggccggccagc

SEQ ID NO: 168198 - DNA, 17 bp, Arabidopsis thaliana
tttgcgggtgatagcgg

SEQ ID NO: 168199 - DNA, 17 bp, Arabidopsis thaliana
tttgcgggttaggtgac

SEQ ID NO: 168200 - DNA, 17 bp, Arabidopsis thaliana
tttgcgggtttacgatg

SEQ ID NO: 168201 - DNA, 17 bp, Arabidopsis thaliana
tttgcggtacgggagaa

SEQ ID NO: 168202 - DNA, 17 bp, Arabidopsis thaliana
tttgcggtcgtcaacga

SEQ ID NO: 168203 - DNA, 17 bp, Arabidopsis thaliana
tttgcggtgcgaaagaa

SEQ ID NO: 168204 - DNA, 17 bp, Arabidopsis thaliana
tttgcggtgcgagagaa

SEQ ID NO: 168205 - DNA, 17 bp, Arabidopsis thaliana
tttgcggtgtcttgaag

SEQ ID NO: 168206 - DNA, 17 bp, Arabidopsis thaliana
tttgcggttgcagacgg

SEQ ID NO: 168207 - DNA, 17 bp, Arabidopsis thaliana
tttgcggttgcgagcgg

SEQ ID NO: 168208 - DNA, 17 bp, Arabidopsis thaliana
tttgcggttgcgggcag

SEQ ID NO: 168209 - DNA, 17 bp, Arabidopsis thaliana
tttgcggttgcgggcgc

SEQ ID NO: 168210 - DNA, 17 bp, Arabidopsis thaliana
tttgcggttgcgggcgg

SEQ ID NO: 168211 - DNA, 17 bp, Arabidopsis thaliana
tttgcggttgcgggtgg

SEQ ID NO: 168212 - DNA, 17 bp, Arabidopsis thaliana
tttgcggttgttagcga

SEQ ID NO: 168213 - DNA, 17 bp, Arabidopsis thaliana
tttgcgtccagaggatt

SEQ ID NO: 168214 - DNA, 17 bp, Arabidopsis thaliana
tttgcgtccagatcttg

SEQ ID NO: 168215 - DNA, 17 bp, Arabidopsis thaliana
tttgcgtccggaggatt

SEQ ID NO: 168216 - DNA, 17 bp, Arabidopsis thaliana
tttgcgtcctccaggca

SEQ ID NO: 168217 - DNA, 17 bp, Arabidopsis thaliana
tttgcgtcctttgtcgt

SEQ ID NO: 168218 - DNA, 17 bp, Arabidopsis thaliana
tttgcgtcttcgaatac

SEQ ID NO: 168219 - DNA, 17 bp, Arabidopsis thaliana
tttgcgtcttcttctcc

SEQ ID NO: 168220 - DNA, 17 bp, Arabidopsis thaliana
tttgcgtgattgccaca

SEQ ID NO: 168221 - DNA, 17 bp, Arabidopsis thaliana
tttgcgtggttgccaca

SEQ ID NO: 168222 - DNA, 17 bp, Arabidopsis thaliana
tttgcgtgtttaccggg

SEQ ID NO: 168223 - DNA, 17 bp, Arabidopsis thaliana
tttgcgttagtttgcga

SEQ ID NO: 168224 - DNA, 17 bp, Arabidopsis thaliana
tttgcgttagtttgcgg

SEQ ID NO: 168225 - DNA, 17 bp, Arabidopsis thaliana
tttgctaagagatcccc

SEQ ID NO: 168226 - DNA, 17 bp, Arabidopsis thaliana
tttgctaagagatccgc

SEQ ID NO: 168227 - DNA, 17 bp, Arabidopsis thaliana
tttgctaatccttctgt

SEQ ID NO: 168228 - DNA, 17 bp, Arabidopsis thaliana
tttgctaatgcgtctac

SEQ ID NO: 168229 - DNA, 17 bp, Arabidopsis thaliana
tttgctacagaaagttt

SEQ ID NO: 168230 - DNA, 17 bp, Arabidopsis thaliana
tttgctaccacactcac

SEQ ID NO: 168231 - DNA, 17 bp, Arabidopsis thaliana
tttgctacggattgctt

SEQ ID NO: 168232 - DNA, 17 bp, Arabidopsis thaliana
tttgctatggtgaaatt

SEQ ID NO: 168233 - DNA, 17 bp, Arabidopsis thaliana
tttgctattgttgtgcc

SEQ ID NO: 168234 - DNA, 17 bp, Arabidopsis thaliana
tttgctattgttgtggc

SEQ ID NO: 168235 - DNA, 17 bp, Arabidopsis thaliana
tttgctatttggatgct

SEQ ID NO: 168236 - DNA, 17 bp, Arabidopsis thaliana
tttgctcaactccagtg

SEQ ID NO: 168237 - DNA, 17 bp, Arabidopsis thaliana
tttgctcactggcgtcc

SEQ ID NO: 168238 - DNA, 17 bp, Arabidopsis thaliana
tttgctcagctagatct

SEQ ID NO: 168239 - DNA, 17 bp, Arabidopsis thaliana
tttgctcagtctggcga

SEQ ID NO: 168240 - DNA, 17 bp, Arabidopsis thaliana
tttgctccacaactttg

SEQ ID NO: 168241 - DNA, 17 bp, Arabidopsis thaliana
tttgctccaggtttccc

SEQ ID NO: 168242 - DNA, 17 bp, Arabidopsis thaliana
tttgctcgattgctagg

SEQ ID NO: 168243 - DNA, 17 bp, Arabidopsis thaliana
tttgctcgcggtggtcc

SEQ ID NO: 168244 - DNA, 17 bp, Arabidopsis thaliana
tttgctcgcgttggtcc

SEQ ID NO: 168245 - DNA, 17 bp, Arabidopsis thaliana
tttgctcggcagctcat

SEQ ID NO: 168246 - DNA, 17 bp, Arabidopsis thaliana
tttgctcgggaactaga

SEQ ID NO: 168247 - DNA, 17 bp, Arabidopsis thaliana
tttgctcgggttcgtaa

SEQ ID NO: 168248 - DNA, 17 bp, Arabidopsis thaliana
tttgctcgtggcaacta

SEQ ID NO: 168249 - DNA, 17 bp, Arabidopsis thaliana
tttgctcgttcatgttc

SEQ ID NO: 168250 - DNA, 17 bp, Arabidopsis thaliana
tttgctctcaccgtttg

SEQ ID NO: 168251 - DNA, 17 bp, Arabidopsis thaliana
tttgctctccgagcagc

SEQ ID NO: 168252 - DNA, 17 bp, Arabidopsis thaliana
tttgctctcctctcttt

SEQ ID NO: 168253 - DNA, 17 bp, Arabidopsis thaliana
tttgctctgcgattgcg

SEQ ID NO: 168254 - DNA, 17 bp, Arabidopsis thaliana
tttgctcttgttgtcgg

SEQ ID NO: 168255 - DNA, 17 bp, Arabidopsis thaliana
tttgctgaaggacaatg

SEQ ID NO: 168256 - DNA, 17 bp, Arabidopsis thaliana
tttgctgaaggcgtcat

SEQ ID NO: 168257 - DNA, 17 bp, Arabidopsis thaliana
tttgctgaatccacttg

SEQ ID NO: 168258 - DNA, 17 bp, Arabidopsis thaliana
tttgctgaccgcctgtc

SEQ ID NO: 168259 - DNA, 17 bp, Arabidopsis thaliana
tttgctgagatcggtta

SEQ ID NO: 168260 - DNA, 17 bp, Arabidopsis thaliana
tttgctgcagatgtgga

SEQ ID NO: 168261 - DNA, 17 bp, Arabidopsis thaliana
tttgctgcagctggtga

SEQ ID NO: 168262 - DNA, 17 bp, Arabidopsis thaliana
tttgctgcagtggacac

SEQ ID NO: 168263 - DNA, 17 bp, Arabidopsis thaliana
tttgctgccactttgtg

SEQ ID NO: 168264 - DNA, 17 bp, Arabidopsis thaliana
tttgctgccctaagtct

SEQ ID NO: 168265 - DNA, 17 bp, Arabidopsis thaliana
tttgctgccgacggtgt

SEQ ID NO: 168266 - DNA, 17 bp, Arabidopsis thaliana
tttgctgcctaaaacat

SEQ ID NO: 168267 - DNA, 17 bp, Arabidopsis thaliana
tttgctgcctcgttaca

SEQ ID NO: 168268 - DNA, 17 bp, Arabidopsis thaliana
tttgctgctacagttga

SEQ ID NO: 168269 - DNA, 17 bp, Arabidopsis thaliana
tttgctgcttctacaac

SEQ ID NO: 168270 - DNA, 17 bp, Arabidopsis thaliana
tttgctggattggttca

SEQ ID NO: 168271 - DNA, 17 bp, Arabidopsis thaliana
tttgctgggccgaaact

SEQ ID NO: 168272 - DNA, 17 bp, Arabidopsis thaliana
tttgctgtagctcttcg

SEQ ID NO: 168273 - DNA, 17 bp, Arabidopsis thaliana
tttgctgtccgtctgtc

SEQ ID NO: 168274 - DNA, 17 bp, Arabidopsis thaliana
tttgctgtccttgctag

SEQ ID NO: 168275 - DNA, 17 bp, Arabidopsis thaliana
tttgctgtcgttccaac

SEQ ID NO: 168276 - DNA, 17 bp, Arabidopsis thaliana
tttgctgtgctcaggac

SEQ ID NO: 168277 - DNA, 17 bp, Arabidopsis thaliana
tttgctgtgctcagggc

SEQ ID NO: 168278 - DNA, 17 bp, Arabidopsis thaliana
tttgctgtggagtacca

SEQ ID NO: 168279 - DNA, 17 bp, Arabidopsis thaliana
tttgctgttgcgagcag

SEQ ID NO: 168280 - DNA, 17 bp, Arabidopsis thaliana
tttgcttaactcttcga

SEQ ID NO: 168281 - DNA, 17 bp, Arabidopsis thaliana
tttgcttaagggtgaac

SEQ ID NO: 168282 - DNA, 17 bp, Arabidopsis thaliana
tttgcttacaatgttcc

SEQ ID NO: 168283 - DNA, 17 bp, Arabidopsis thaliana
tttgcttacatggagca

SEQ ID NO: 168284 - DNA, 17 bp, Arabidopsis thaliana
tttgcttaccgatccat

SEQ ID NO: 168285 - DNA, 17 bp, Arabidopsis thaliana
tttgcttagaagcgatc

SEQ ID NO: 168286 - DNA, 17 bp, Arabidopsis thaliana
tttgcttcagtggaccg

SEQ ID NO: 168287 - DNA, 17 bp, Arabidopsis thaliana
tttgcttcagtgtgacg

SEQ ID NO: 168288 - DNA, 17 bp, Arabidopsis thaliana
tttgcttccagcttgtc

SEQ ID NO: 168289 - DNA, 17 bp, Arabidopsis thaliana
tttgcttccagctttgt

SEQ ID NO: 168290 - DNA, 17 bp, Arabidopsis thaliana
tttgcttccagcttttg

SEQ ID NO: 168291 - DNA, 17 bp, Arabidopsis thaliana
tttgcttccagcttttt

SEQ ID NO: 168292 - DNA, 17 bp, Arabidopsis thaliana
tttgcttccgactgttc

SEQ ID NO: 168293 - DNA, 17 bp, Arabidopsis thaliana
tttgcttcgcacagcac

SEQ ID NO: 168294 - DNA, 17 bp, Arabidopsis thaliana
tttgcttcgtgtccagg

SEQ ID NO: 168295 - DNA, 17 bp, Arabidopsis thaliana
tttgcttctaaagccgt

SEQ ID NO: 168296 - DNA, 17 bp, Arabidopsis thaliana
tttgcttctgcaacctg

SEQ ID NO: 168297 - DNA, 17 bp, Arabidopsis thaliana
tttgcttgacaatgtcc

SEQ ID NO: 168298 - DNA, 17 bp, Arabidopsis thaliana
tttgcttgatggctgag

SEQ ID NO: 168299 - DNA, 17 bp, Arabidopsis thaliana
tttgcttgattgttgta

SEQ ID NO: 168300 - DNA, 17 bp, Arabidopsis thaliana
tttgcttgcagagagaa

SEQ ID NO: 168301 - DNA, 17 bp, Arabidopsis thaliana
tttgcttgcttatgacc

SEQ ID NO: 168302 - DNA, 17 bp, Arabidopsis thaliana
tttgcttgcttatgacg

SEQ ID NO: 168303 - DNA, 17 bp, Arabidopsis thaliana
tttgcttggatgaattt

SEQ ID NO: 168304 - DNA, 17 bp, Arabidopsis thaliana
tttgcttgtggctgtta

SEQ ID NO: 168305 - DNA, 17 bp, Arabidopsis thaliana
tttgcttgtgtgcccca

SEQ ID NO: 168306 - DNA, 17 bp, Arabidopsis thaliana
tttgcttgttgagccaa

SEQ ID NO: 168307 - DNA, 17 bp, Arabidopsis thaliana
tttgcttgttgctggcg

SEQ ID NO: 168308 - DNA, 17 bp, Arabidopsis thaliana
tttgctttacaagcctt

SEQ ID NO: 168309 - DNA, 17 bp, Arabidopsis thaliana
tttgctttggccgagtg

SEQ ID NO: 168310 - DNA, 17 bp, Arabidopsis thaliana
tttgctttgtgcgacct

SEQ ID NO: 168311 - DNA, 17 bp, Arabidopsis thaliana
tttgcttttgaccaatg

SEQ ID NO: 168312 - DNA, 17 bp, Arabidopsis thaliana
tttggaaactgctaagg

SEQ ID NO: 168313 - DNA, 17 bp, Arabidopsis thaliana
tttggaaatgatctggt

SEQ ID NO: 168314 - DNA, 17 bp, Arabidopsis thaliana
tttggaaattttctgcc

SEQ ID NO: 168315 - DNA, 17 bp, Arabidopsis thaliana
tttggaaccaaggtctg

SEQ ID NO: 168316 - DNA, 17 bp, Arabidopsis thaliana
tttggaacctaagttga

SEQ ID NO: 168317 - DNA, 17 bp, Arabidopsis thaliana
tttggaacctccatcca

SEQ ID NO: 168318 - DNA, 17 bp, Arabidopsis thaliana
tttggaacgacgacggt

SEQ ID NO: 168319 - DNA, 17 bp, Arabidopsis thaliana
tttggaagacaattgcc

SEQ ID NO: 168320 - DNA, 17 bp, Arabidopsis thaliana
tttggaagcctcggtat

SEQ ID NO: 168321 - DNA, 17 bp, Arabidopsis thaliana
tttggaagcgactcgcg

SEQ ID NO: 168322 - DNA, 17 bp, Arabidopsis thaliana
tttggaaggccaagagg

SEQ ID NO: 168323 - DNA, 17 bp, Arabidopsis thaliana
tttggaagtggagacta

SEQ ID NO: 168324 - DNA, 17 bp, Arabidopsis thaliana
tttggaatcgctaacga

SEQ ID NO: 168325 - DNA, 17 bp, Arabidopsis thaliana
tttggaatctccgtcgt

SEQ ID NO: 168326 - DNA, 17 bp, Arabidopsis thaliana
tttggaatgctttccga

SEQ ID NO: 168327 - DNA, 17 bp, Arabidopsis thaliana
tttggaattgatattga

SEQ ID NO: 168328 - DNA, 17 bp, Arabidopsis thaliana
tttggacaccgatgttc

SEQ ID NO: 168329 - DNA, 17 bp, Arabidopsis thaliana
tttggacactggaatac

SEQ ID NO: 168330 - DNA, 17 bp, Arabidopsis thaliana
tttggacagaggtaaca

SEQ ID NO: 168331 - DNA, 17 bp, Arabidopsis thaliana
tttggaccaaatttttt

SEQ ID NO: 168332 - DNA, 17 bp, Arabidopsis thaliana
tttggaccaatttttgc

SEQ ID NO: 168333 - DNA, 17 bp, Arabidopsis thaliana
tttggaccacacttgtt

SEQ ID NO: 168334 - DNA, 17 bp, Arabidopsis thaliana
tttggaccaggctgcat

SEQ ID NO: 168335 - DNA, 17 bp, Arabidopsis thaliana
tttggaccaggcttcat

SEQ ID NO: 168336 - DNA, 17 bp, Arabidopsis thaliana
tttggaccaggcttcct

SEQ ID NO: 168337 - DNA, 17 bp, Arabidopsis thaliana
tttggacccacccaccc

SEQ ID NO: 168338 - DNA, 17 bp, Arabidopsis thaliana
tttggacccatccaccc

SEQ ID NO: 168339 - DNA, 17 bp, Arabidopsis thaliana
tttggacccatggactc

SEQ ID NO: 168340 - DNA, 17 bp, Arabidopsis thaliana
tttggaccccccccccc

SEQ ID NO: 168341 - DNA, 17 bp, Arabidopsis thaliana
tttggacccgtcaaaca

SEQ ID NO: 168342 - DNA, 17 bp, Arabidopsis thaliana
tttggaccctccctccc

SEQ ID NO: 168343 - DNA, 17 bp, Arabidopsis thaliana
tttggaccgaaacccgt

SEQ ID NO: 168344 - DNA, 17 bp, Arabidopsis thaliana
tttggaccgattcccgt

SEQ ID NO: 168345 - DNA, 17 bp, Arabidopsis thaliana
tttggaccgttcgaaat

SEQ ID NO: 168346 - DNA, 17 bp, Arabidopsis thaliana
tttggacctggtgaatt

SEQ ID NO: 168347 - DNA, 17 bp, Arabidopsis thaliana
tttggacgaagagtttg

SEQ ID NO: 168348 - DNA, 17 bp, Arabidopsis thaliana
tttggacgcctgataaa

SEQ ID NO: 168349 - DNA, 17 bp, Arabidopsis thaliana
tttggacggaccatttg

SEQ ID NO: 168350 - DNA, 17 bp, Arabidopsis thaliana
tttggacgtcttcggtg

SEQ ID NO: 168351 - DNA, 17 bp, Arabidopsis thaliana
tttggactaatccaata

SEQ ID NO: 168352 - DNA, 17 bp, Arabidopsis thaliana
tttggactacacatgca

SEQ ID NO: 168353 - DNA, 17 bp, Arabidopsis thaliana
tttggactgaagcgtgg

SEQ ID NO: 168354 - DNA, 17 bp, Arabidopsis thaliana
tttggactgaagggacg

SEQ ID NO: 168355 - DNA, 17 bp, Arabidopsis thaliana
tttggactgaagggccc

SEQ ID NO: 168356 - DNA, 17 bp, Arabidopsis thaliana
tttggactgagtttagc

SEQ ID NO: 168357 - DNA, 17 bp, Arabidopsis thaliana
tttggactgggcaagcc

SEQ ID NO: 168358 - DNA, 17 bp, Arabidopsis thaliana
tttggacttcctcaaca

SEQ ID NO: 168359 - DNA, 17 bp, Arabidopsis thaliana
tttggagaagagatcgt

SEQ ID NO: 168360 - DNA, 17 bp, Arabidopsis thaliana
tttggagaatcctcaaa

SEQ ID NO: 168361 - DNA, 17 bp, Arabidopsis thaliana
tttggagaatcctcaag

SEQ ID NO: 168362 - DNA, 17 bp, Arabidopsis thaliana
tttggagaatgtcgttt

SEQ ID NO: 168363 - DNA, 17 bp, Arabidopsis thaliana
tttggagaattacgggt

SEQ ID NO: 168364 - DNA, 17 bp, Arabidopsis thaliana
tttggagacccgctatc

SEQ ID NO: 168365 - DNA, 17 bp, Arabidopsis thaliana
tttggagagctttccag

SEQ ID NO: 168366 - DNA, 17 bp, Arabidopsis thaliana
tttggagcaggtgaact

SEQ ID NO: 168367 - DNA, 17 bp, Arabidopsis thaliana
tttggagcatagcacaa

SEQ ID NO: 168368 - DNA, 17 bp, Arabidopsis thaliana
tttggagcccgagacaa

SEQ ID NO: 168369 - DNA, 17 bp, Arabidopsis thaliana
tttggagcctcttttgg

SEQ ID NO: 168370 - DNA, 17 bp, Arabidopsis thaliana
tttggaggaattcaaga

SEQ ID NO: 168371 - DNA, 17 bp, Arabidopsis thaliana
tttggaggacattgtca

SEQ ID NO: 168372 - DNA, 17 bp, Arabidopsis thaliana
tttggaggaccaggtgg

SEQ ID NO: 168373 - DNA, 17 bp, Arabidopsis thaliana
tttggaggagttacaga

SEQ ID NO: 168374 - DNA, 17 bp, Arabidopsis thaliana
tttggaggagtttcaga

SEQ ID NO: 168375 - DNA, 17 bp, Arabidopsis thaliana
tttggagtagctctggg

SEQ ID NO: 168376 - DNA, 17 bp, Arabidopsis thaliana
tttggagtgcaacacca

SEQ ID NO: 168377 - DNA, 17 bp, Arabidopsis thaliana
tttggagttctcttgtg

SEQ ID NO: 168378 - DNA, 17 bp, Arabidopsis thaliana
tttggagttctggatgg

SEQ ID NO: 168379 - DNA, 17 bp, Arabidopsis thaliana
tttggagttgtggaaat

SEQ ID NO: 168380 - DNA, 17 bp, Arabidopsis thaliana
tttggataaggctttgc

SEQ ID NO: 168381 - DNA, 17 bp, Arabidopsis thaliana
tttggataagtccgtaa

SEQ ID NO: 168382 - DNA, 17 bp, Arabidopsis thaliana
tttggataagtccttct

SEQ ID NO: 168383 - DNA, 17 bp, Arabidopsis thaliana
tttggatacgactttag

SEQ ID NO: 168384 - DNA, 17 bp, Arabidopsis thaliana
tttggatacttgcctcg

SEQ ID NO: 168385 - DNA, 17 bp, Arabidopsis thaliana
tttggatatcgaattcg

SEQ ID NO: 168386 - DNA, 17 bp, Arabidopsis thaliana
tttggatcaagtctgca

SEQ ID NO: 168387 - DNA, 17 bp, Arabidopsis thaliana
tttggatcagcaaatgc

SEQ ID NO: 168388 - DNA, 17 bp, Arabidopsis thaliana
tttggatcagtttgcac

SEQ ID NO: 168389 - DNA, 17 bp, Arabidopsis thaliana
tttggatccaacctcgg

SEQ ID NO: 168390 - DNA, 17 bp, Arabidopsis thaliana
tttggatccagcttcga

SEQ ID NO: 168391 - DNA, 17 bp, Arabidopsis thaliana
tttggatccagcttcgg

SEQ ID NO: 168392 - DNA, 17 bp, Arabidopsis thaliana
tttggatccgcacgtgc

SEQ ID NO: 168393 - DNA, 17 bp, Arabidopsis thaliana
tttggatccgcgcgtgc

SEQ ID NO: 168394 - DNA, 17 bp, Arabidopsis thaliana
tttggatcgaagggagc

SEQ ID NO: 168395 - DNA, 17 bp, Arabidopsis thaliana
tttggatcgacgtgtcc

SEQ ID NO: 168396 - DNA, 17 bp, Arabidopsis thaliana
tttggatcgggccttgt

SEQ ID NO: 168397 - DNA, 17 bp, Arabidopsis thaliana
tttggatcgtagattgc

SEQ ID NO: 168398 - DNA, 17 bp, Arabidopsis thaliana
tttggatcgtgaccaac

SEQ ID NO: 168399 - DNA, 17 bp, Arabidopsis thaliana
tttggatctgcctatgc

SEQ ID NO: 168400 - DNA, 17 bp, Arabidopsis thaliana
tttggatcttcaacagt

SEQ ID NO: 168401 - DNA, 17 bp, Arabidopsis thaliana
tttggatcttcaagacc

SEQ ID NO: 168402 - DNA, 17 bp, Arabidopsis thaliana
tttggatctttctttct

SEQ ID NO: 168403 - DNA, 17 bp, Arabidopsis thaliana
tttggatgaagggagct

SEQ ID NO: 168404 - DNA, 17 bp, Arabidopsis thaliana
tttggatgatggatctg

SEQ ID NO: 168405 - DNA, 17 bp, Arabidopsis thaliana
tttggatgattttgtag

SEQ ID NO: 168406 - DNA, 17 bp, Arabidopsis thaliana
tttggatgcggttttgg

SEQ ID NO: 168407 - DNA, 17 bp, Arabidopsis thaliana
tttggatgctctatctg

SEQ ID NO: 168408 - DNA, 17 bp, Arabidopsis thaliana
tttggatgctgctcagc

SEQ ID NO: 168409 - DNA, 17 bp, Arabidopsis thaliana
tttggatggatgactgt

SEQ ID NO: 168410 - DNA, 17 bp, Arabidopsis thaliana
tttggatgttccatctg

SEQ ID NO: 168411 - DNA, 17 bp, Arabidopsis thaliana
tttggattacgttgctc

SEQ ID NO: 168412 - DNA, 17 bp, Arabidopsis thaliana
tttggattactgtgcca

SEQ ID NO: 168413 - DNA, 17 bp, Arabidopsis thaliana
tttggattacttcctca

SEQ ID NO: 168414 - DNA, 17 bp, Arabidopsis thaliana
tttggattagaccgtcg

SEQ ID NO: 168415 - DNA, 17 bp, Arabidopsis thaliana
tttggattcagcccaga

SEQ ID NO: 168416 - DNA, 17 bp, Arabidopsis thaliana
tttggattgaagtgagc

SEQ ID NO: 168417 - DNA, 17 bp, Arabidopsis thaliana
tttggattgaatggagc

SEQ ID NO: 168418 - DNA, 17 bp, Arabidopsis thaliana
tttggattgacgggagc

SEQ ID NO: 168419 - DNA, 17 bp, Arabidopsis thaliana
tttggattgagggagct

SEQ ID NO: 168420 - DNA, 17 bp, Arabidopsis thaliana
tttggattgatggagct

SEQ ID NO: 168421 - DNA, 17 bp, Arabidopsis thaliana
tttggattggattcacc

SEQ ID NO: 168422 - DNA, 17 bp, Arabidopsis thaliana
tttggattgggtaggtt

SEQ ID NO: 168423 - DNA, 17 bp, Arabidopsis thaliana
tttggatttaaggaagc

SEQ ID NO: 168424 - DNA, 17 bp, Arabidopsis thaliana
tttggatttaagggagg

SEQ ID NO: 168425 - DNA, 17 bp, Arabidopsis thaliana
tttggatttgatcgttt

SEQ ID NO: 168426 - DNA, 17 bp, Arabidopsis thaliana
tttggatttgttgatgg

SEQ ID NO: 168427 - DNA, 17 bp, Arabidopsis thaliana
tttggattttaccaaag

SEQ ID NO: 168428 - DNA, 17 bp, Arabidopsis thaliana
tttggatttttgccccg

SEQ ID NO: 168429 - DNA, 17 bp, Arabidopsis thaliana
tttggcaacatggatcg

SEQ ID NO: 168430 - DNA, 17 bp, Arabidopsis thaliana
tttggcaagacggattt

SEQ ID NO: 168431 - DNA, 17 bp, Arabidopsis thaliana
tttggcacctcgatgtc

SEQ ID NO: 168432 - DNA, 17 bp, Arabidopsis thaliana
tttggcacgtctgcctg

SEQ ID NO: 168433 - DNA, 17 bp, Arabidopsis thaliana
tttggcactctactttg

SEQ ID NO: 168434 - DNA, 17 bp, Arabidopsis thaliana
tttggcactctcttttt

SEQ ID NO: 168435 - DNA, 17 bp, Arabidopsis thaliana
tttggcagatgtgatga

SEQ ID NO: 168436 - DNA, 17 bp, Arabidopsis thaliana
tttggcaggacgagttt

SEQ ID NO: 168437 - DNA, 17 bp, Arabidopsis thaliana
tttggcaggacgggttt

SEQ ID NO: 168438 - DNA, 17 bp, Arabidopsis thaliana
tttggcaggacgttact

SEQ ID NO: 168439 - DNA, 17 bp, Arabidopsis thaliana
tttggcagtttctcggt

SEQ ID NO: 168440 - DNA, 17 bp, Arabidopsis thaliana
tttggcataaccattga

SEQ ID NO: 168441 - DNA, 17 bp, Arabidopsis thaliana
tttggcatatgcctgct

SEQ ID NO: 168442 - DNA, 17 bp, Arabidopsis thaliana
tttggcatgcggagtag

SEQ ID NO: 168443 - DNA, 17 bp, Arabidopsis thaliana
tttggcatggaggttta

SEQ ID NO: 168444 - DNA, 17 bp, Arabidopsis thaliana
tttggcattctgtccac

SEQ ID NO: 168445 - DNA, 17 bp, Arabidopsis thaliana
tttggcattctgtctac

SEQ ID NO: 168446 - DNA, 17 bp, Arabidopsis thaliana
tttggcatttcgtccac

SEQ ID NO: 168447 - DNA, 17 bp, Arabidopsis thaliana
tttggccactttttgaa

SEQ ID NO: 168448 - DNA, 17 bp, Arabidopsis thaliana
tttggccctgctgtgtt

SEQ ID NO: 168449 - DNA, 17 bp, Arabidopsis thaliana
tttggccgagggcacgt

SEQ ID NO: 168450 - DNA, 17 bp, Arabidopsis thaliana
tttggccgggtcaacga

SEQ ID NO: 168451 - DNA, 17 bp, Arabidopsis thaliana
tttggcctggtcaacat

SEQ ID NO: 168452 - DNA, 17 bp, Arabidopsis thaliana
tttggcctggtcaacga

SEQ ID NO: 168453 - DNA, 17 bp, Arabidopsis thaliana
tttggcctgtcggaacc

SEQ ID NO: 168454 - DNA, 17 bp, Arabidopsis thaliana
tttggcgaagtttccga

SEQ ID NO: 168455 - DNA, 17 bp, Arabidopsis thaliana
tttggcgactcattgac

SEQ ID NO: 168456 - DNA, 17 bp, Arabidopsis thaliana
tttggcgagacggattt

SEQ ID NO: 168457 - DNA, 17 bp, Arabidopsis thaliana
tttggcgagacgggttt

SEQ ID NO: 168458 - DNA, 17 bp, Arabidopsis thaliana
tttggcgcagttagttt

SEQ ID NO: 168459 - DNA, 17 bp, Arabidopsis thaliana
tttggcgctaaaacttg

SEQ ID NO: 168460 - DNA, 17 bp, Arabidopsis thaliana
tttggcgggaaaatacg

SEQ ID NO: 168461 - DNA, 17 bp, Arabidopsis thaliana
tttggcgggaaaatcac

SEQ ID NO: 168462 - DNA, 17 bp, Arabidopsis thaliana
tttggcgggaaaatgtt

SEQ ID NO: 168463 - DNA, 17 bp, Arabidopsis thaliana
tttggcgggaaaatttc

SEQ ID NO: 168464 - DNA, 17 bp, Arabidopsis thaliana
tttggcgggaaactttc

SEQ ID NO: 168465 - DNA, 17 bp, Arabidopsis thaliana
tttggcgggacgggttt

SEQ ID NO: 168466 - DNA, 17 bp, Arabidopsis thaliana
tttggcgggatgagttt

SEQ ID NO: 168467 - DNA, 17 bp, Arabidopsis thaliana
tttggcggttatgaatc

SEQ ID NO: 168468 - DNA, 17 bp, Arabidopsis thaliana
tttggctaaaactgcac

SEQ ID NO: 168469 - DNA, 17 bp, Arabidopsis thaliana
tttggctaaagacttcg

SEQ ID NO: 168470 - DNA, 17 bp, Arabidopsis thaliana
tttggctaaagttttgt

SEQ ID NO: 168471 - DNA, 17 bp, Arabidopsis thaliana
tttggctaagggcaaag

SEQ ID NO: 168472 - DNA, 17 bp, Arabidopsis thaliana
tttggctacttcaggtt

SEQ ID NO: 168473 - DNA, 17 bp, Arabidopsis thaliana
tttggctcaaacccaga

SEQ ID NO: 168474 - DNA, 17 bp, Arabidopsis thaliana
tttggctcagatacatt

SEQ ID NO: 168475 - DNA, 17 bp, Arabidopsis thaliana
tttggctcatgggattc

SEQ ID NO: 168476 - DNA, 17 bp, Arabidopsis thaliana
tttggctcctggtaaga

SEQ ID NO: 168477 - DNA, 17 bp, Arabidopsis thaliana
tttggctcggaacgcgt

SEQ ID NO: 168478 - DNA, 17 bp, Arabidopsis thaliana
tttggctcggattcgga

SEQ ID NO: 168479 - DNA, 17 bp, Arabidopsis thaliana
tttggctcggtctctgg

SEQ ID NO: 168480 - DNA, 17 bp, Arabidopsis thaliana
tttggctcggtcttgct

SEQ ID NO: 168481 - DNA, 17 bp, Arabidopsis thaliana
tttggctctatttggcg

SEQ ID NO: 168482 - DNA, 17 bp, Arabidopsis thaliana
tttggctgacacacaat

SEQ ID NO: 168483 - DNA, 17 bp, Arabidopsis thaliana
tttggctgcaactcttg

SEQ ID NO: 168484 - DNA, 17 bp, Arabidopsis thaliana
tttggctggggcggcac

SEQ ID NO: 168485 - DNA, 17 bp, Arabidopsis thaliana
tttggcttactatctca

SEQ ID NO: 168486 - DNA, 17 bp, Arabidopsis thaliana
tttggcttggtcaacga

SEQ ID NO: 168487 - DNA, 17 bp, Arabidopsis thaliana
tttggctttctgatccc

SEQ ID NO: 168488 - DNA, 17 bp, Arabidopsis thaliana
tttgggaaatcgaggca

SEQ ID NO: 168489 - DNA, 17 bp, Arabidopsis thaliana
tttgggaagcatttgca

SEQ ID NO: 168490 - DNA, 17 bp, Arabidopsis thaliana
tttgggaagtctgtcag

SEQ ID NO: 168491 - DNA, 17 bp, Arabidopsis thaliana
tttgggaatgcagccac

SEQ ID NO: 168492 - DNA, 17 bp, Arabidopsis thaliana
tttgggaatttgacgca

SEQ ID NO: 168493 - DNA, 17 bp, Arabidopsis thaliana
tttgggacttcgccaaa

SEQ ID NO: 168494 - DNA, 17 bp, Arabidopsis thaliana
tttgggagacaaagggc

SEQ ID NO: 168495 - DNA, 17 bp, Arabidopsis thaliana
tttgggagcagaggtcg

SEQ ID NO: 168496 - DNA, 17 bp, Arabidopsis thaliana
tttgggaggattacgga

SEQ ID NO: 168497 - DNA, 17 bp, Arabidopsis thaliana
tttgggagtgcctcgtt

SEQ ID NO: 168498 - DNA, 17 bp, Arabidopsis thaliana
tttgggatcagtggatg

SEQ ID NO: 168499 - DNA, 17 bp, Arabidopsis thaliana
tttgggatcatactgac

SEQ ID NO: 168500 - DNA, 17 bp, Arabidopsis thaliana
tttgggatcttcgtcat

SEQ ID NO: 168501 - DNA, 17 bp, Arabidopsis thaliana
tttgggatggagaatac

SEQ ID NO: 168502 - DNA, 17 bp, Arabidopsis thaliana
tttgggatgtatgttgt

SEQ ID NO: 168503 - DNA, 17 bp, Arabidopsis thaliana
tttgggatgtccatcca

SEQ ID NO: 168504 - DNA, 17 bp, Arabidopsis thaliana
tttgggatgtccatccg

SEQ ID NO: 168505 - DNA, 17 bp, Arabidopsis thaliana
tttgggattggttgcag

SEQ ID NO: 168506 - DNA, 17 bp, Arabidopsis thaliana
tttgggcaacgtttgat

SEQ ID NO: 168507 - DNA, 17 bp, Arabidopsis thaliana
tttgggcaccgccaaat

SEQ ID NO: 168508 - DNA, 17 bp, Arabidopsis thaliana
tttgggcagagaagccc

SEQ ID NO: 168509 - DNA, 17 bp, Arabidopsis thaliana
tttgggcataatcgtga

SEQ ID NO: 168510 - DNA, 17 bp, Arabidopsis thaliana
tttgggcatatgaccag

SEQ ID NO: 168511 - DNA, 17 bp, Arabidopsis thaliana
tttgggcatgtcgttaa

SEQ ID NO: 168512 - DNA, 17 bp, Arabidopsis thaliana
tttgggccaaataacat

SEQ ID NO: 168513 - DNA, 17 bp, Arabidopsis thaliana
tttgggccacagcaaat

SEQ ID NO: 168514 - DNA, 17 bp, Arabidopsis thaliana
tttgggcccgcacatgc

SEQ ID NO: 168515 - DNA, 17 bp, Arabidopsis thaliana
tttgggccgaattccgt

SEQ ID NO: 168516 - DNA, 17 bp, Arabidopsis thaliana
tttgggcctcgggatgt

SEQ ID NO: 168517 - DNA, 17 bp, Arabidopsis thaliana
tttgggcctgggaggat

SEQ ID NO: 168518 - DNA, 17 bp, Arabidopsis thaliana
tttgggccttttcgtga

SEQ ID NO: 168519 - DNA, 17 bp, Arabidopsis thaliana
tttgggcgaatactcga

SEQ ID NO: 168520 - DNA, 17 bp, Arabidopsis thaliana
tttgggctatattacgg

SEQ ID NO: 168521 - DNA, 17 bp, Arabidopsis thaliana
tttgggctcgagcaatt

SEQ ID NO: 168522 - DNA, 17 bp, Arabidopsis thaliana
tttgggctctatctggc

SEQ ID NO: 168523 - DNA, 17 bp, Arabidopsis thaliana
tttgggctctatctggt

SEQ ID NO: 168524 - DNA, 17 bp, Arabidopsis thaliana
tttgggctctatttggc

SEQ ID NO: 168525 - DNA, 17 bp, Arabidopsis thaliana
tttgggctgctgcaata

SEQ ID NO: 168526 - DNA, 17 bp, Arabidopsis thaliana
tttgggctggcgtgtcg

SEQ ID NO: 168527 - DNA, 17 bp, Arabidopsis thaliana
tttgggctggcgtgtgg

SEQ ID NO: 168528 - DNA, 17 bp, Arabidopsis thaliana
tttgggcttgccgaaaa

SEQ ID NO: 168529 - DNA, 17 bp, Arabidopsis thaliana
tttgggctttatctggc

SEQ ID NO: 168530 - DNA, 17 bp, Arabidopsis thaliana
tttgggctttccgaaaa

SEQ ID NO: 168531 - DNA, 17 bp, Arabidopsis thaliana
tttgggctttccgataa

SEQ ID NO: 168532 - DNA, 17 bp, Arabidopsis thaliana
tttgggctttctgtact

SEQ ID NO: 168533 - DNA, 17 bp, Arabidopsis thaliana
tttggggaatccgactg

SEQ ID NO: 168534 - DNA, 17 bp, Arabidopsis thaliana
tttggggactatggttt

SEQ ID NO: 168535 - DNA, 17 bp, Arabidopsis thaliana
tttggggcgtccatttc

SEQ ID NO: 168536 - DNA, 17 bp, Arabidopsis thaliana
tttggggctttcgctat

SEQ ID NO: 168537 - DNA, 17 bp, Arabidopsis thaliana
tttgggggaccagctga

SEQ ID NO: 168538 - DNA, 17 bp, Arabidopsis thaliana
tttgggggagaagttca

SEQ ID NO: 168539 - DNA, 17 bp, Arabidopsis thaliana
tttgggggtgcggtttg

SEQ ID NO: 168540 - DNA, 17 bp, Arabidopsis thaliana
tttggggtacgactcgt

SEQ ID NO: 168541 - DNA, 17 bp, Arabidopsis thaliana
tttggggtatccggcgg

SEQ ID NO: 168542 - DNA, 17 bp, Arabidopsis thaliana
tttgggtaagtcctgtg

SEQ ID NO: 168543 - DNA, 17 bp, Arabidopsis thaliana
tttgggtacggtgtatg

SEQ ID NO: 168544 - DNA, 17 bp, Arabidopsis thaliana
tttgggtcacgcgaggc

SEQ ID NO: 168545 - DNA, 17 bp, Arabidopsis thaliana
tttgggtccgcatatgt

SEQ ID NO: 168546 - DNA, 17 bp, Arabidopsis thaliana
tttgggtcggatccagt

SEQ ID NO: 168547 - DNA, 17 bp, Arabidopsis thaliana
tttgggtctacctatgc

SEQ ID NO: 168548 - DNA, 17 bp, Arabidopsis thaliana
tttgggtctcggggtgt

SEQ ID NO: 168549 - DNA, 17 bp, Arabidopsis thaliana
tttgggtcttagccata

SEQ ID NO: 168550 - DNA, 17 bp, Arabidopsis thaliana
tttgggtgacgcctcag

SEQ ID NO: 168551 - DNA, 17 bp, Arabidopsis thaliana
tttgggtgatcgttgac

SEQ ID NO: 168552 - DNA, 17 bp, Arabidopsis thaliana
tttgggtgcaccgccga

SEQ ID NO: 168553 - DNA, 17 bp, Arabidopsis thaliana
tttgggtgcgagaggtc

SEQ ID NO: 168554 - DNA, 17 bp, Arabidopsis thaliana
tttgggtggacctgtac

SEQ ID NO: 168555 - DNA, 17 bp, Arabidopsis thaliana
tttgggttccaaaataa

SEQ ID NO: 168556 - DNA, 17 bp, Arabidopsis thaliana
tttgggttccgggggga

SEQ ID NO: 168557 - DNA, 17 bp, Arabidopsis thaliana
tttgggttcgggtttgt

SEQ ID NO: 168558 - DNA, 17 bp, Arabidopsis thaliana
tttgggttcgggttttt

SEQ ID NO: 168559 - DNA, 17 bp, Arabidopsis thaliana
tttgggttgatattcat

SEQ ID NO: 168560 - DNA, 17 bp, Arabidopsis thaliana
tttgggttggagtgtag

SEQ ID NO: 168561 - DNA, 17 bp, Arabidopsis thaliana
tttggtagagttattcc

SEQ ID NO: 168562 - DNA, 17 bp, Arabidopsis thaliana
tttggtaggtgcggctg

SEQ ID NO: 168563 - DNA, 17 bp, Arabidopsis thaliana
tttggtatgcgtttgtc

SEQ ID NO: 168564 - DNA, 17 bp, Arabidopsis thaliana
tttggtcaaagtccgta

SEQ ID NO: 168565 - DNA, 17 bp, Arabidopsis thaliana
tttggtcaatccatctc

SEQ ID NO: 168566 - DNA, 17 bp, Arabidopsis thaliana
tttggtcaccattcaca

SEQ ID NO: 168567 - DNA, 17 bp, Arabidopsis thaliana
tttggtcacggtcgctg

SEQ ID NO: 168568 - DNA, 17 bp, Arabidopsis thaliana
tttggtcacttgttgag

SEQ ID NO: 168569 - DNA, 17 bp, Arabidopsis thaliana
tttggtcaggatactcg

SEQ ID NO: 168570 - DNA, 17 bp, Arabidopsis thaliana
tttggtcaggtcaacga

SEQ ID NO: 168571 - DNA, 17 bp, Arabidopsis thaliana
tttggtccaatcgtcaa

SEQ ID NO: 168572 - DNA, 17 bp, Arabidopsis thaliana
tttggtcccaaggctcg

SEQ ID NO: 168573 - DNA, 17 bp, Arabidopsis thaliana
tttggtccgaccgatat

SEQ ID NO: 168574 - DNA, 17 bp, Arabidopsis thaliana
tttggtccgtccatcta

SEQ ID NO: 168575 - DNA, 17 bp, Arabidopsis thaliana
tttggtccttcgatgtc

SEQ ID NO: 168576 - DNA, 17 bp, Arabidopsis thaliana
tttggtcgccatgtttt

SEQ ID NO: 168577 - DNA, 17 bp, Arabidopsis thaliana
tttggtcgcgactacag

SEQ ID NO: 168578 - DNA, 17 bp, Arabidopsis thaliana
tttggtcgctggatatg

SEQ ID NO: 168579 - DNA, 17 bp, Arabidopsis thaliana
tttggtcgctgtcgctg

SEQ ID NO: 168580 - DNA, 17 bp, Arabidopsis thaliana
tttggtctcaaggcaga

SEQ ID NO: 168581 - DNA, 17 bp, Arabidopsis thaliana
tttggtctcatcagcaa

SEQ ID NO: 168582 - DNA, 17 bp, Arabidopsis thaliana
tttggtctgtcctctgc

SEQ ID NO: 168583 - DNA, 17 bp, Arabidopsis thaliana
tttggtgaaccaaagac

SEQ ID NO: 168584 - DNA, 17 bp, Arabidopsis thaliana
tttggtgaacctgcgga

SEQ ID NO: 168585 - DNA, 17 bp, Arabidopsis thaliana
tttggtgactgaactgc

SEQ ID NO: 168586 - DNA, 17 bp, Arabidopsis thaliana
tttggtgccagcagccg

SEQ ID NO: 168587 - DNA, 17 bp, Arabidopsis thaliana
tttggtgcgggagaagt

SEQ ID NO: 168588 - DNA, 17 bp, Arabidopsis thaliana
tttggtggaacttgttt

SEQ ID NO: 168589 - DNA, 17 bp, Arabidopsis thaliana
tttggtggataccgagg

SEQ ID NO: 168590 - DNA, 17 bp, Arabidopsis thaliana
tttggtggatgtgcata

SEQ ID NO: 168591 - DNA, 17 bp, Arabidopsis thaliana
tttggtggcggcctaag

SEQ ID NO: 168592 - DNA, 17 bp, Arabidopsis thaliana
tttggtggttcagtagg

SEQ ID NO: 168593 - DNA, 17 bp, Arabidopsis thaliana
tttggtggttcagtagt

SEQ ID NO: 168594 - DNA, 17 bp, Arabidopsis thaliana
tttggtgtgcattggtc

SEQ ID NO: 168595 - DNA, 17 bp, Arabidopsis thaliana
tttggtgtgcattggtg

SEQ ID NO: 168596 - DNA, 17 bp, Arabidopsis thaliana
tttggtgtgctcctact

SEQ ID NO: 168597 - DNA, 17 bp, Arabidopsis thaliana
tttggtgtgtgcgtttg

SEQ ID NO: 168598 - DNA, 17 bp, Arabidopsis thaliana
tttggtgtgttctagca

SEQ ID NO: 168599 - DNA, 17 bp, Arabidopsis thaliana
tttggtgttgagactgt

SEQ ID NO: 168600 - DNA, 17 bp, Arabidopsis thaliana
tttggttaacaggaaaa

SEQ ID NO: 168601 - DNA, 17 bp, Arabidopsis thaliana
tttggttacacggaaac

SEQ ID NO: 168602 - DNA, 17 bp, Arabidopsis thaliana
tttggttatccggttta

SEQ ID NO: 168603 - DNA, 17 bp, Arabidopsis thaliana
tttggttatgacggcaa

SEQ ID NO: 168604 - DNA, 17 bp, Arabidopsis thaliana
tttggttatgagcaatc

SEQ ID NO: 168605 - DNA, 17 bp, Arabidopsis thaliana
tttggttatgcgaattt

SEQ ID NO: 168606 - DNA, 17 bp, Arabidopsis thaliana
tttggttcacgtggaat

SEQ ID NO: 168607 - DNA, 17 bp, Arabidopsis thaliana
tttggttcatactgacg

SEQ ID NO: 168608 - DNA, 17 bp, Arabidopsis thaliana
tttggttccaaccatgt

SEQ ID NO: 168609 - DNA, 17 bp, Arabidopsis thaliana
tttggttccagcttcgg

SEQ ID NO: 168610 - DNA, 17 bp, Arabidopsis thaliana
tttggttcgaagcagaa

SEQ ID NO: 168611 - DNA, 17 bp, Arabidopsis thaliana
tttggttcgattgtgaa

SEQ ID NO: 168612 - DNA, 17 bp, Arabidopsis thaliana
tttggttcgggtccaat

SEQ ID NO: 168613 - DNA, 17 bp, Arabidopsis thaliana
tttggttgaagggagct

SEQ ID NO: 168614 - DNA, 17 bp, Arabidopsis thaliana
tttggttgcttcacgtg

SEQ ID NO: 168615 - DNA, 17 bp, Arabidopsis thaliana
tttggttgtcggcacca

SEQ ID NO: 168616 - DNA, 17 bp, Arabidopsis thaliana
tttggtttcacgttgac

SEQ ID NO: 168617 - DNA, 17 bp, Arabidopsis thaliana
tttggtttcatcgcgcc

SEQ ID NO: 168618 - DNA, 17 bp, Arabidopsis thaliana
tttggtttcggttcgga

SEQ ID NO: 168619 - DNA, 17 bp, Arabidopsis thaliana
tttggttttagcctctt

SEQ ID NO: 168620 - DNA, 17 bp, Arabidopsis thaliana
tttggtttttccatcct

SEQ ID NO: 168621 - DNA, 17 bp, Arabidopsis thaliana
tttggtttttgtgcggg

SEQ ID NO: 168622 - DNA, 17 bp, Arabidopsis thaliana
tttgtaaaatggctcgg

SEQ ID NO: 168623 - DNA, 17 bp, Arabidopsis thaliana
tttgtaaaggcctgggc

SEQ ID NO: 168624 - DNA, 17 bp, Arabidopsis thaliana
tttgtaactactggacc

SEQ ID NO: 168625 - DNA, 17 bp, Arabidopsis thaliana
tttgtaagaccttgctc

SEQ ID NO: 168626 - DNA, 17 bp, Arabidopsis thaliana
tttgtaagctggtggac

SEQ ID NO: 168627 - DNA, 17 bp, Arabidopsis thaliana
tttgtaatccggatttc

SEQ ID NO: 168628 - DNA, 17 bp, Arabidopsis thaliana
tttgtaatctcatcaag

SEQ ID NO: 168629 - DNA, 17 bp, Arabidopsis thaliana
tttgtacacaccacccg

SEQ ID NO: 168630 - DNA, 17 bp, Arabidopsis thaliana
tttgtacacaccgaccg

SEQ ID NO: 168631 - DNA, 17 bp, Arabidopsis thaliana
tttgtacacaccgcccg

SEQ ID NO: 168632 - DNA, 17 bp, Arabidopsis thaliana
tttgtacacaccgcttg

SEQ ID NO: 168633 - DNA, 17 bp, Arabidopsis thaliana
tttgtacacctccgttt

SEQ ID NO: 168634 - DNA, 17 bp, Arabidopsis thaliana
tttgtacccaaccgctt

SEQ ID NO: 168635 - DNA, 17 bp, Arabidopsis thaliana
tttgtacccgggctcag

SEQ ID NO: 168636 - DNA, 17 bp, Arabidopsis thaliana
tttgtaccgaaccgcat

SEQ ID NO: 168637 - DNA, 17 bp, Arabidopsis thaliana
tttgtaccttttccgtt

SEQ ID NO: 168638 - DNA, 17 bp, Arabidopsis thaliana
tttgtacgaatagtctt

SEQ ID NO: 168639 - DNA, 17 bp, Arabidopsis thaliana
tttgtacgacgaatcga

SEQ ID NO: 168640 - DNA, 17 bp, Arabidopsis thaliana
tttgtacgtacggaccg

SEQ ID NO: 168641 - DNA, 17 bp, Arabidopsis thaliana
tttgtactgaacgcgac

SEQ ID NO: 168642 - DNA, 17 bp, Arabidopsis thaliana
tttgtactgccaaagtg

SEQ ID NO: 168643 - DNA, 17 bp, Arabidopsis thaliana
tttgtactgctgctcat

SEQ ID NO: 168644 - DNA, 17 bp, Arabidopsis thaliana
tttgtacttgggaaccc

SEQ ID NO: 168645 - DNA, 17 bp, Arabidopsis thaliana
tttgtagacaggcttcc

SEQ ID NO: 168646 - DNA, 17 bp, Arabidopsis thaliana
tttgtagcagtggtttc

SEQ ID NO: 168647 - DNA, 17 bp, Arabidopsis thaliana
tttgtagcctagtcgtg

SEQ ID NO: 168648 - DNA, 17 bp, Arabidopsis thaliana
tttgtagcctgacttga

SEQ ID NO: 168649 - DNA, 17 bp, Arabidopsis thaliana
tttgtagcctttgatct

SEQ ID NO: 168650 - DNA, 17 bp, Arabidopsis thaliana
tttgtagcgaaccgcat

SEQ ID NO: 168651 - DNA, 17 bp, Arabidopsis thaliana
tttgtagcgcctctctc

SEQ ID NO: 168652 - DNA, 17 bp, Arabidopsis thaliana
tttgtaggaaacagatc

SEQ ID NO: 168653 - DNA, 17 bp, Arabidopsis thaliana
tttgtagggatcaaaca

SEQ ID NO: 168654 - DNA, 17 bp, Arabidopsis thaliana
tttgtaggttctaagag

SEQ ID NO: 168655 - DNA, 17 bp, Arabidopsis thaliana
tttgtagtcccgttttc

SEQ ID NO: 168656 - DNA, 17 bp, Arabidopsis thaliana
tttgtagtctgcagacc

SEQ ID NO: 168657 - DNA, 17 bp, Arabidopsis thaliana
tttgtatccaaaccgat

SEQ ID NO: 168658 - DNA, 17 bp, Arabidopsis thaliana
tttgtatcccctgttga

SEQ ID NO: 168659 - DNA, 17 bp, Arabidopsis thaliana
tttgtatctgttccaag

SEQ ID NO: 168660 - DNA, 17 bp, Arabidopsis thaliana
tttgtatgtaaaaacgg

SEQ ID NO: 168661 - DNA, 17 bp, Arabidopsis thaliana
tttgtcaaagccttcat

SEQ ID NO: 168662 - DNA, 17 bp, Arabidopsis thaliana
tttgtcagaatttggcc

SEQ ID NO: 168663 - DNA, 17 bp, Arabidopsis thaliana
tttgtcagccgaatacg

SEQ ID NO: 168664 - DNA, 17 bp, Arabidopsis thaliana
tttgtcagggtattctt

SEQ ID NO: 168665 - DNA, 17 bp, Arabidopsis thaliana
tttgtcagtttcttcac

SEQ ID NO: 168666 - DNA, 17 bp, Arabidopsis thaliana
tttgtcatgatcagggc

SEQ ID NO: 168667 - DNA, 17 bp, Arabidopsis thaliana
tttgtcatgatcaggtc

SEQ ID NO: 168668 - DNA, 17 bp, Arabidopsis thaliana
tttgtcatgttcctcgt

SEQ ID NO: 168669 - DNA, 17 bp, Arabidopsis thaliana
tttgtcattgtctttgc

SEQ ID NO: 168670 - DNA, 17 bp, Arabidopsis thaliana
tttgtccaaaggaccaa

SEQ ID NO: 168671 - DNA, 17 bp, Arabidopsis thaliana
tttgtccacgtgttata

SEQ ID NO: 168672 - DNA, 17 bp, Arabidopsis thaliana
tttgtcccagaactcaa

SEQ ID NO: 168673 - DNA, 17 bp, Arabidopsis thaliana
tttgtcccatccgacaa

SEQ ID NO: 168674 - DNA, 17 bp, Arabidopsis thaliana
tttgtccgaaccactgc

SEQ ID NO: 168675 - DNA, 17 bp, Arabidopsis thaliana
tttgtccgacagttgta

SEQ ID NO: 168676 - DNA, 17 bp, Arabidopsis thaliana
tttgtccgctgcctcca

SEQ ID NO: 168677 - DNA, 17 bp, Arabidopsis thaliana
tttgtccgcttggaccg

SEQ ID NO: 168678 - DNA, 17 bp, Arabidopsis thaliana
tttgtccgcttgggccg

SEQ ID NO: 168679 - DNA, 17 bp, Arabidopsis thaliana
tttgtccgtattatccg

SEQ ID NO: 168680 - DNA, 17 bp, Arabidopsis thaliana
tttgtccgttgctatgg

SEQ ID NO: 168681 - DNA, 17 bp, Arabidopsis thaliana
tttgtcctacaggacaa

SEQ ID NO: 168682 - DNA, 17 bp, Arabidopsis thaliana
tttgtcctcttgccccc

SEQ ID NO: 168683 - DNA, 17 bp, Arabidopsis thaliana
tttgtccttcgaggtgc

SEQ ID NO: 168684 - DNA, 17 bp, Arabidopsis thaliana
tttgtccttgctaggaa

SEQ ID NO: 168685 - DNA, 17 bp, Arabidopsis thaliana
tttgtcgaagccagttc

SEQ ID NO: 168686 - DNA, 17 bp, Arabidopsis thaliana
tttgtcgaccccaaatt

SEQ ID NO: 168687 - DNA, 17 bp, Arabidopsis thaliana
tttgtcgaccccaattt

SEQ ID NO: 168688 - DNA, 17 bp, Arabidopsis thaliana
tttgtcgacctacaaaa

SEQ ID NO: 168689 - DNA, 17 bp, Arabidopsis thaliana
tttgtcgactccaaatt

SEQ ID NO: 168690 - DNA, 17 bp, Arabidopsis thaliana
tttgtcgagggatgaga

SEQ ID NO: 168691 - DNA, 17 bp, Arabidopsis thaliana
tttgtcgattagcccta

SEQ ID NO: 168692 - DNA, 17 bp, Arabidopsis thaliana
tttgtcgcagagcgttt

SEQ ID NO: 168693 - DNA, 17 bp, Arabidopsis thaliana
tttgtcgcatcctgtag

SEQ ID NO: 168694 - DNA, 17 bp, Arabidopsis thaliana
tttgtcgctaagatacg

SEQ ID NO: 168695 - DNA, 17 bp, Arabidopsis thaliana
tttgtcgctaagattcg

SEQ ID NO: 168696 - DNA, 17 bp, Arabidopsis thaliana
tttgtcgctttgcaatt

SEQ ID NO: 168697 - DNA, 17 bp, Arabidopsis thaliana
tttgtcggatgtgttta

SEQ ID NO: 168698 - DNA, 17 bp, Arabidopsis thaliana
tttgtcggccctctcaa

SEQ ID NO: 168699 - DNA, 17 bp, Arabidopsis thaliana
tttgtcgttacatagtc

SEQ ID NO: 168700 - DNA, 17 bp, Arabidopsis thaliana
tttgtcgttagccaagc

SEQ ID NO: 168701 - DNA, 17 bp, Arabidopsis thaliana
tttgtcgttgcagtatt

SEQ ID NO: 168702 - DNA, 17 bp, Arabidopsis thaliana
tttgtctaagaaaagtg

SEQ ID NO: 168703 - DNA, 17 bp, Arabidopsis thaliana
tttgtctaccaattcga

SEQ ID NO: 168704 - DNA, 17 bp, Arabidopsis thaliana
tttgtctaccttgagct

SEQ ID NO: 168705 - DNA, 17 bp, Arabidopsis thaliana
tttgtctagatcgatat

SEQ ID NO: 168706 - DNA, 17 bp, Arabidopsis thaliana
tttgtctcaaaaaatct

SEQ ID NO: 168707 - DNA, 17 bp, Arabidopsis thaliana
tttgtctcaaggaccaa

SEQ ID NO: 168708 - DNA, 17 bp, Arabidopsis thaliana
tttgtctcaagtccgac

SEQ ID NO: 168709 - DNA, 17 bp, Arabidopsis thaliana
tttgtctccagatcttt

SEQ ID NO: 168710 - DNA, 17 bp, Arabidopsis thaliana
tttgtctccgccaaatc

SEQ ID NO: 168711 - DNA, 17 bp, Arabidopsis thaliana
tttgtctctaaccaact

SEQ ID NO: 168712 - DNA, 17 bp, Arabidopsis thaliana
tttgtctctaagcaacg

SEQ ID NO: 168713 - DNA, 17 bp, Arabidopsis thaliana
tttgtctcttgaccctt

SEQ ID NO: 168714 - DNA, 17 bp, Arabidopsis thaliana
tttgtctgactttgtca

SEQ ID NO: 168715 - DNA, 17 bp, Arabidopsis thaliana
tttgtctgcctgggtgt

SEQ ID NO: 168716 - DNA, 17 bp, Arabidopsis thaliana
tttgtctgcggttttgt

SEQ ID NO: 168717 - DNA, 17 bp, Arabidopsis thaliana
tttgtctgctcgaaccg

SEQ ID NO: 168718 - DNA, 17 bp, Arabidopsis thaliana
tttgtctgcttggaccg

SEQ ID NO: 168719 - DNA, 17 bp, Arabidopsis thaliana
tttgtcttgaggcacgg

SEQ ID NO: 168720 - DNA, 17 bp, Arabidopsis thaliana
tttgtgaaatgacttga

SEQ ID NO: 168721 - DNA, 17 bp, Arabidopsis thaliana
tttgtgaacctaattgg

SEQ ID NO: 168722 - DNA, 17 bp, Arabidopsis thaliana
tttgtgaactcatcctt

SEQ ID NO: 168723 - DNA, 17 bp, Arabidopsis thaliana
tttgtgacaaggtcgaa

SEQ ID NO: 168724 - DNA, 17 bp, Arabidopsis thaliana
tttgtgaccatcggagc

SEQ ID NO: 168725 - DNA, 17 bp, Arabidopsis thaliana
tttgtgacccattgttc

SEQ ID NO: 168726 - DNA, 17 bp, Arabidopsis thaliana
tttgtgactaactccgg

SEQ ID NO: 168727 - DNA, 17 bp, Arabidopsis thaliana
tttgtgactcaaggtta

SEQ ID NO: 168728 - DNA, 17 bp, Arabidopsis thaliana
tttgtgacttttgtcct

SEQ ID NO: 168729 - DNA, 17 bp, Arabidopsis thaliana
tttgtgaggctttttct

SEQ ID NO: 168730 - DNA, 17 bp, Arabidopsis thaliana
tttgtgatcgtggtggt

SEQ ID NO: 168731 - DNA, 17 bp, Arabidopsis thaliana
tttgtgatcgtggtgtt

SEQ ID NO: 168732 - DNA, 17 bp, Arabidopsis thaliana
tttgtgatctatcagtt

SEQ ID NO: 168733 - DNA, 17 bp, Arabidopsis thaliana
tttgtgatgaacgtaca

SEQ ID NO: 168734 - DNA, 17 bp, Arabidopsis thaliana
tttgtgatgatgtgtga

SEQ ID NO: 168735 - DNA, 17 bp, Arabidopsis thaliana
tttgtgatggatattcc

SEQ ID NO: 168736 - DNA, 17 bp, Arabidopsis thaliana
tttgtgatggttacggg

SEQ ID NO: 168737 - DNA, 17 bp, Arabidopsis thaliana
tttgtgatttgggagct

SEQ ID NO: 168738 - DNA, 17 bp, Arabidopsis thaliana
tttgtgcaacttttttg

SEQ ID NO: 168739 - DNA, 17 bp, Arabidopsis thaliana
tttgtgcacgggactcc

SEQ ID NO: 168740 - DNA, 17 bp, Arabidopsis thaliana
tttgtgcattggtcggc

SEQ ID NO: 168741 - DNA, 17 bp, Arabidopsis thaliana
tttgtgccaaataatcc

SEQ ID NO: 168742 - DNA, 17 bp, Arabidopsis thaliana
tttgtgccaaatgattt

SEQ ID NO: 168743 - DNA, 17 bp, Arabidopsis thaliana
tttgtgccaaattgtcc

SEQ ID NO: 168744 - DNA, 17 bp, Arabidopsis thaliana
tttgtgccgaagcccgt

SEQ ID NO: 168745 - DNA, 17 bp, Arabidopsis thaliana
tttgtgccgccggtgct

SEQ ID NO: 168746 - DNA, 17 bp, Arabidopsis thaliana
tttgtgccggcgactgc

SEQ ID NO: 168747 - DNA, 17 bp, Arabidopsis thaliana
tttgtgcgcttgggaat

SEQ ID NO: 168748 - DNA, 17 bp, Arabidopsis thaliana
tttgtgcgcttgggagc

SEQ ID NO: 168749 - DNA, 17 bp, Arabidopsis thaliana
tttgtgcgcttgggagt

SEQ ID NO: 168750 - DNA, 17 bp, Arabidopsis thaliana
tttgtgctatatgacgg

SEQ ID NO: 168751 - DNA, 17 bp, Arabidopsis thaliana
tttgtgctatattacgg

SEQ ID NO: 168752 - DNA, 17 bp, Arabidopsis thaliana
tttgtgctctgctaaga

SEQ ID NO: 168753 - DNA, 17 bp, Arabidopsis thaliana
tttgtgctctgcttctt

SEQ ID NO: 168754 - DNA, 17 bp, Arabidopsis thaliana
tttgtgctttgatctga

SEQ ID NO: 168755 - DNA, 17 bp, Arabidopsis thaliana
tttgtggaagttgcgtt

SEQ ID NO: 168756 - DNA, 17 bp, Arabidopsis thaliana
tttgtggaccgagtcca

SEQ ID NO: 168757 - DNA, 17 bp, Arabidopsis thaliana
tttgtggactaactacg

SEQ ID NO: 168758 - DNA, 17 bp, Arabidopsis thaliana
tttgtggacttcttcct

SEQ ID NO: 168759 - DNA, 17 bp, Arabidopsis thaliana
tttgtggattggtttca

SEQ ID NO: 168760 - DNA, 17 bp, Arabidopsis thaliana
tttgtggccaaagtttc

SEQ ID NO: 168761 - DNA, 17 bp, Arabidopsis thaliana
tttgtggcgaccagcac

SEQ ID NO: 168762 - DNA, 17 bp, Arabidopsis thaliana
tttgtggctaagggtcg

SEQ ID NO: 168763 - DNA, 17 bp, Arabidopsis thaliana
tttgtggctcaagatca

SEQ ID NO: 168764 - DNA, 17 bp, Arabidopsis thaliana
tttgtggctgaagcaat

SEQ ID NO: 168765 - DNA, 17 bp, Arabidopsis thaliana
tttgtgggatggttatt

SEQ ID NO: 168766 - DNA, 17 bp, Arabidopsis thaliana
tttgtgggcattggtcg

SEQ ID NO: 168767 - DNA, 17 bp, Arabidopsis thaliana
tttgtgggctaaagctt

SEQ ID NO: 168768 - DNA, 17 bp, Arabidopsis thaliana
tttgtggtctgcagcac

SEQ ID NO: 168769 - DNA, 17 bp, Arabidopsis thaliana
tttgtggtggtggagac

SEQ ID NO: 168770 - DNA, 17 bp, Arabidopsis thaliana
tttgtggtttgcaggct

SEQ ID NO: 168771 - DNA, 17 bp, Arabidopsis thaliana
tttgtgtaacttctacc

SEQ ID NO: 168772 - DNA, 17 bp, Arabidopsis thaliana
tttgtgtactacaagtt

SEQ ID NO: 168773 - DNA, 17 bp, Arabidopsis thaliana
tttgtgtactcagggcg

SEQ ID NO: 168774 - DNA, 17 bp, Arabidopsis thaliana
tttgtgtcaaatagtcc

SEQ ID NO: 168775 - DNA, 17 bp, Arabidopsis thaliana
tttgtgtcaactgagga

SEQ ID NO: 168776 - DNA, 17 bp, Arabidopsis thaliana
tttgtgtcaagtcccca

SEQ ID NO: 168777 - DNA, 17 bp, Arabidopsis thaliana
tttgtgtcaggacctac

SEQ ID NO: 168778 - DNA, 17 bp, Arabidopsis thaliana
tttgtgtcgttaggtgt

SEQ ID NO: 168779 - DNA, 17 bp, Arabidopsis thaliana
tttgtgtctatgccccg

SEQ ID NO: 168780 - DNA, 17 bp, Arabidopsis thaliana
tttgtgtctatgctccg

SEQ ID NO: 168781 - DNA, 17 bp, Arabidopsis thaliana
tttgtgtgaaacgaccg

SEQ ID NO: 168782 - DNA, 17 bp, Arabidopsis thaliana
tttgtgtggcagactct

SEQ ID NO: 168783 - DNA, 17 bp, Arabidopsis thaliana
tttgtgtgtcgtccaaa

SEQ ID NO: 168784 - DNA, 17 bp, Arabidopsis thaliana
tttgtgttacgccgcta

SEQ ID NO: 168785 - DNA, 17 bp, Arabidopsis thaliana
tttgtgttgaccaagtt

SEQ ID NO: 168786 - DNA, 17 bp, Arabidopsis thaliana
tttgtgttgacgaagtt

SEQ ID NO: 168787 - DNA, 17 bp, Arabidopsis thaliana
tttgtgttgtgctgctc

SEQ ID NO: 168788 - DNA, 17 bp, Arabidopsis thaliana
tttgttaaagtttgggc

SEQ ID NO: 168789 - DNA, 17 bp, Arabidopsis thaliana
tttgttacactttgcgc

SEQ ID NO: 168790 - DNA, 17 bp, Arabidopsis thaliana
tttgttacacttttcgc

SEQ ID NO: 168791 - DNA, 17 bp, Arabidopsis thaliana
tttgttacccttttggc

SEQ ID NO: 168792 - DNA, 17 bp, Arabidopsis thaliana
tttgttaccgtcggatc

SEQ ID NO: 168793 - DNA, 17 bp, Arabidopsis thaliana
tttgttaccttggagct

SEQ ID NO: 168794 - DNA, 17 bp, Arabidopsis thaliana
tttgttactggagagcg

SEQ ID NO: 168795 - DNA, 17 bp, Arabidopsis thaliana
tttgttagaccgtcgtg

SEQ ID NO: 168796 - DNA, 17 bp, Arabidopsis thaliana
tttgttagattctcaat

SEQ ID NO: 168797 - DNA, 17 bp, Arabidopsis thaliana
tttgttagccgtgtgtt

SEQ ID NO: 168798 - DNA, 17 bp, Arabidopsis thaliana
tttgttagtcagacgag

SEQ ID NO: 168799 - DNA, 17 bp, Arabidopsis thaliana
tttgttatggtttcttg

SEQ ID NO: 168800 - DNA, 17 bp, Arabidopsis thaliana
tttgttcaaatccagga

SEQ ID NO: 168801 - DNA, 17 bp, Arabidopsis thaliana
tttgttcacaattcgaa

SEQ ID NO: 168802 - DNA, 17 bp, Arabidopsis thaliana
tttgttcaccgatcaaa

SEQ ID NO: 168803 - DNA, 17 bp, Arabidopsis thaliana
tttgttcaccttgtttg

SEQ ID NO: 168804 - DNA, 17 bp, Arabidopsis thaliana
tttgttcacggaagaga

SEQ ID NO: 168805 - DNA, 17 bp, Arabidopsis thaliana
tttgttcatctaccgaa

SEQ ID NO: 168806 - DNA, 17 bp, Arabidopsis thaliana
tttgttccccaaaatcc

SEQ ID NO: 168807 - DNA, 17 bp, Arabidopsis thaliana
tttgttccctcgtttgc

SEQ ID NO: 168808 - DNA, 17 bp, Arabidopsis thaliana
tttgttccgcatgatgt

SEQ ID NO: 168809 - DNA, 17 bp, Arabidopsis thaliana
tttgttccgctagaacc

SEQ ID NO: 168810 - DNA, 17 bp, Arabidopsis thaliana
tttgttcgaaggtcgcc

SEQ ID NO: 168811 - DNA, 17 bp, Arabidopsis thaliana
tttgttcgagggtagac

SEQ ID NO: 168812 - DNA, 17 bp, Arabidopsis thaliana
tttgttcgagtctgggt

SEQ ID NO: 168813 - DNA, 17 bp, Arabidopsis thaliana
tttgttcgcaagcgtct

SEQ ID NO: 168814 - DNA, 17 bp, Arabidopsis thaliana
tttgttcgcctctgtct

SEQ ID NO: 168815 - DNA, 17 bp, Arabidopsis thaliana
tttgttcgccttttttg

SEQ ID NO: 168816 - DNA, 17 bp, Arabidopsis thaliana
tttgttcgcttggaccg

SEQ ID NO: 168817 - DNA, 17 bp, Arabidopsis thaliana
tttgttcgtcagccatt

SEQ ID NO: 168818 - DNA, 17 bp, Arabidopsis thaliana
tttgttcgtttggaccg

SEQ ID NO: 168819 - DNA, 17 bp, Arabidopsis thaliana
tttgttctatttgtggt

SEQ ID NO: 168820 - DNA, 17 bp, Arabidopsis thaliana
tttgttctcggttcgtt

SEQ ID NO: 168821 - DNA, 17 bp, Arabidopsis thaliana
tttgttgaccactagtt

SEQ ID NO: 168822 - DNA, 17 bp, Arabidopsis thaliana
tttgttgacgttcccaa

SEQ ID NO: 168823 - DNA, 17 bp, Arabidopsis thaliana
tttgttgactggaccat

SEQ ID NO: 168824 - DNA, 17 bp, Arabidopsis thaliana
tttgttgactggcaccg

SEQ ID NO: 168825 - DNA, 17 bp, Arabidopsis thaliana
tttgttgactgtgccat

SEQ ID NO: 168826 - DNA, 17 bp, Arabidopsis thaliana
tttgttgacttgctgtg

SEQ ID NO: 168827 - DNA, 17 bp, Arabidopsis thaliana
tttgttgactttgccaa

SEQ ID NO: 168828 - DNA, 17 bp, Arabidopsis thaliana
tttgttgagccgtcaca

SEQ ID NO: 168829 - DNA, 17 bp, Arabidopsis thaliana
tttgttgaggctcttcc

SEQ ID NO: 168830 - DNA, 17 bp, Arabidopsis thaliana
tttgttgatgatgtgca

SEQ ID NO: 168831 - DNA, 17 bp, Arabidopsis thaliana
tttgttgcaactgacct

SEQ ID NO: 168832 - DNA, 17 bp, Arabidopsis thaliana
tttgttgcccatcaagt

SEQ ID NO: 168833 - DNA, 17 bp, Arabidopsis thaliana
tttgttgcgaccgaaac

SEQ ID NO: 168834 - DNA, 17 bp, Arabidopsis thaliana
tttgttgcgtccacctt

SEQ ID NO: 168835 - DNA, 17 bp, Arabidopsis thaliana
tttgttgctatgcggct

SEQ ID NO: 168836 - DNA, 17 bp, Arabidopsis thaliana
tttgttgctcacttttc

SEQ ID NO: 168837 - DNA, 17 bp, Arabidopsis thaliana
tttgttggagtcctagc

SEQ ID NO: 168838 - DNA, 17 bp, Arabidopsis thaliana
tttgttggcgactcagg

SEQ ID NO: 168839 - DNA, 17 bp, Arabidopsis thaliana
tttgttggctagactct

SEQ ID NO: 168840 - DNA, 17 bp, Arabidopsis thaliana
tttgttgggttagggtt

SEQ ID NO: 168841 - DNA, 17 bp, Arabidopsis thaliana
tttgttgtctgttcgac

SEQ ID NO: 168842 - DNA, 17 bp, Arabidopsis thaliana
tttgttgtgctcagggc

SEQ ID NO: 168843 - DNA, 17 bp, Arabidopsis thaliana
tttgttgtgtagccact

SEQ ID NO: 168844 - DNA, 17 bp, Arabidopsis thaliana
tttgttgtgtctttcta

SEQ ID NO: 168845 - DNA, 17 bp, Arabidopsis thaliana
tttgtttaccagtttgt

SEQ ID NO: 168846 - DNA, 17 bp, Arabidopsis thaliana
tttgtttcggcggatca

SEQ ID NO: 168847 - DNA, 17 bp, Arabidopsis thaliana
tttgtttctccatcgag

SEQ ID NO: 168848 - DNA, 17 bp, Arabidopsis thaliana
tttgtttctcccctccc

SEQ ID NO: 168849 - DNA, 17 bp, Arabidopsis thaliana
tttgtttcttttagcac

SEQ ID NO: 168850 - DNA, 17 bp, Arabidopsis thaliana
tttgtttgaccattcac

SEQ ID NO: 168851 - DNA, 17 bp, Arabidopsis thaliana
tttgtttgccgactgat

SEQ ID NO: 168852 - DNA, 17 bp, Arabidopsis thaliana
tttgtttgcctatcgct

SEQ ID NO: 168853 - DNA, 17 bp, Arabidopsis thaliana
tttgtttgcgctgattt

SEQ ID NO: 168854 - DNA, 17 bp, Arabidopsis thaliana
tttgtttggaaagtctg

SEQ ID NO: 168855 - DNA, 17 bp, Arabidopsis thaliana
tttgtttgtaaagaatg

SEQ ID NO: 168856 - DNA, 17 bp, Arabidopsis thaliana
tttgtttgtaaagattg

SEQ ID NO: 168857 - DNA, 17 bp, Arabidopsis thaliana
tttgttttaccgtcccg

SEQ ID NO: 168858 - DNA, 17 bp, Arabidopsis thaliana
ttttaacccgcgggatg

SEQ ID NO: 168859 - DNA, 17 bp, Arabidopsis thaliana
ttttaaccgaagaatcc

SEQ ID NO: 168860 - DNA, 17 bp, Arabidopsis thaliana
ttttaaccgctatcgta

SEQ ID NO: 168861 - DNA, 17 bp, Arabidopsis thaliana
ttttaaccgtgactgat

SEQ ID NO: 168862 - DNA, 17 bp, Arabidopsis thaliana
ttttaacgagatgccca

SEQ ID NO: 168863 - DNA, 17 bp, Arabidopsis thaliana
ttttaactctctccttc

SEQ ID NO: 168864 - DNA, 17 bp, Arabidopsis thaliana
ttttaacttggtgtgga

SEQ ID NO: 168865 - DNA, 17 bp, Arabidopsis thaliana
ttttaagacttagtttt

SEQ ID NO: 168866 - DNA, 17 bp, Arabidopsis thaliana
ttttaagcaccaatgga

SEQ ID NO: 168867 - DNA, 17 bp, Arabidopsis thaliana
ttttaagctatcggtca

SEQ ID NO: 168868 - DNA, 17 bp, Arabidopsis thaliana
ttttaagctcaggttgc

SEQ ID NO: 168869 - DNA, 17 bp, Arabidopsis thaliana
ttttaagctcctggtct

SEQ ID NO: 168870 - DNA, 17 bp, Arabidopsis thaliana
ttttaagctcgagttgc

SEQ ID NO: 168871 - DNA, 17 bp, Arabidopsis thaliana
ttttaagtcaccgagcc

SEQ ID NO: 168872 - DNA, 17 bp, Arabidopsis thaliana
ttttaagtccgccgtca

SEQ ID NO: 168873 - DNA, 17 bp, Arabidopsis thaliana
ttttaagtcgtcggttt

SEQ ID NO: 168874 - DNA, 17 bp, Arabidopsis thaliana
ttttaagttcgggttgc

SEQ ID NO: 168875 - DNA, 17 bp, Arabidopsis thaliana
ttttaatcacttgaccc

SEQ ID NO: 168876 - DNA, 17 bp, Arabidopsis thaliana
ttttaatctctggaatc

SEQ ID NO: 168877 - DNA, 17 bp, Arabidopsis thaliana
ttttacaattagtgcaa

SEQ ID NO: 168878 - DNA, 17 bp, Arabidopsis thaliana
ttttacactcgtcttgg

SEQ ID NO: 168879 - DNA, 17 bp, Arabidopsis thaliana
ttttacagattgttccg

SEQ ID NO: 168880 - DNA, 17 bp, Arabidopsis thaliana
ttttacagtgcgctggt

SEQ ID NO: 168881 - DNA, 17 bp, Arabidopsis thaliana
ttttacagttacgagga

SEQ ID NO: 168882 - DNA, 17 bp, Arabidopsis thaliana
ttttacagttgcgggcg

SEQ ID NO: 168883 - DNA, 17 bp, Arabidopsis thaliana
ttttacagttttggcgg

SEQ ID NO: 168884 - DNA, 17 bp, Arabidopsis thaliana
ttttacataggccaagg

SEQ ID NO: 168885 - DNA, 17 bp, Arabidopsis thaliana
ttttacattcgagatcc

SEQ ID NO: 168886 - DNA, 17 bp, Arabidopsis thaliana
ttttacattgacccgac

SEQ ID NO: 168887 - DNA, 17 bp, Arabidopsis thaliana
ttttacattggcccgac

SEQ ID NO: 168888 - DNA, 17 bp, Arabidopsis thaliana
ttttaccaagattgtcc

SEQ ID NO: 168889 - DNA, 17 bp, Arabidopsis thaliana
ttttaccactctgtccg

SEQ ID NO: 168890 - DNA, 17 bp, Arabidopsis thaliana
ttttaccactggtccaa

SEQ ID NO: 168891 - DNA, 17 bp, Arabidopsis thaliana
ttttaccatttgtccca

SEQ ID NO: 168892 - DNA, 17 bp, Arabidopsis thaliana
ttttacccattgccgcg

SEQ ID NO: 168893 - DNA, 17 bp, Arabidopsis thaliana
ttttaccctactgatgt

SEQ ID NO: 168894 - DNA, 17 bp, Arabidopsis thaliana
ttttacccttgctgcta

SEQ ID NO: 168895 - DNA, 17 bp, Arabidopsis thaliana
ttttaccgtgcgctgga

SEQ ID NO: 168896 - DNA, 17 bp, Arabidopsis thaliana
ttttaccgttgaggttg

SEQ ID NO: 168897 - DNA, 17 bp, Arabidopsis thaliana
ttttaccgttggggcta

SEQ ID NO: 168898 - DNA, 17 bp, Arabidopsis thaliana
ttttaccgttggggctg

SEQ ID NO: 168899 - DNA, 17 bp, Arabidopsis thaliana
ttttacctaggtccgac

SEQ ID NO: 168900 - DNA, 17 bp, Arabidopsis thaliana
ttttacgaatgagcagg

SEQ ID NO: 168901 - DNA, 17 bp, Arabidopsis thaliana
ttttacgataaggttgc

SEQ ID NO: 168902 - DNA, 17 bp, Arabidopsis thaliana
ttttacgatggatttgc

SEQ ID NO: 168903 - DNA, 17 bp, Arabidopsis thaliana
ttttacgattaagtctc

SEQ ID NO: 168904 - DNA, 17 bp, Arabidopsis thaliana
ttttacggaatcatcta

SEQ ID NO: 168905 - DNA, 17 bp, Arabidopsis thaliana
ttttacgggacgggttg

SEQ ID NO: 168906 - DNA, 17 bp, Arabidopsis thaliana
ttttacgggacgggttt

SEQ ID NO: 168907 - DNA, 17 bp, Arabidopsis thaliana
ttttactacgaccgggt

SEQ ID NO: 168908 - DNA, 17 bp, Arabidopsis thaliana
ttttactagataaggcc

SEQ ID NO: 168909 - DNA, 17 bp, Arabidopsis thaliana
ttttactatcgcacccg

SEQ ID NO: 168910 - DNA, 17 bp, Arabidopsis thaliana
ttttactcagctaggta

SEQ ID NO: 168911 - DNA, 17 bp, Arabidopsis thaliana
ttttactccagggagtc

SEQ ID NO: 168912 - DNA, 17 bp, Arabidopsis thaliana
ttttactcgatagactg

SEQ ID NO: 168913 - DNA, 17 bp, Arabidopsis thaliana
ttttactgcaacttgtc

SEQ ID NO: 168914 - DNA, 17 bp, Arabidopsis thaliana
ttttactgcgggccggt

SEQ ID NO: 168915 - DNA, 17 bp, Arabidopsis thaliana
ttttacttatgcgcaga

SEQ ID NO: 168916 - DNA, 17 bp, Arabidopsis thaliana
ttttagaatttccatct

SEQ ID NO: 168917 - DNA, 17 bp, Arabidopsis thaliana
ttttagaccagggtggc

SEQ ID NO: 168918 - DNA, 17 bp, Arabidopsis thaliana
ttttagaccatccccat

SEQ ID NO: 168919 - DNA, 17 bp, Arabidopsis thaliana
ttttagaccgtgaggcc

SEQ ID NO: 168920 - DNA, 17 bp, Arabidopsis thaliana
ttttagacttcagttcg

SEQ ID NO: 168921 - DNA, 17 bp, Arabidopsis thaliana
ttttagattgttgtacc

SEQ ID NO: 168922 - DNA, 17 bp, Arabidopsis thaliana
ttttagattttccctgg

SEQ ID NO: 168923 - DNA, 17 bp, Arabidopsis thaliana
ttttagattttcgctgg

SEQ ID NO: 168924 - DNA, 17 bp, Arabidopsis thaliana
ttttagcaactgctcct

SEQ ID NO: 168925 - DNA, 17 bp, Arabidopsis thaliana
ttttagccgcaacgact

SEQ ID NO: 168926 - DNA, 17 bp, Arabidopsis thaliana
ttttagccgccatcttt

SEQ ID NO: 168927 - DNA, 17 bp, Arabidopsis thaliana
ttttagccgcggcttcg

SEQ ID NO: 168928 - DNA, 17 bp, Arabidopsis thaliana
ttttagcgaattggttc

SEQ ID NO: 168929 - DNA, 17 bp, Arabidopsis thaliana
ttttagcgcctaaaacg

SEQ ID NO: 168930 - DNA, 17 bp, Arabidopsis thaliana
ttttagcgctaaattgt

SEQ ID NO: 168931 - DNA, 17 bp, Arabidopsis thaliana
ttttagctaccgattta

SEQ ID NO: 168932 - DNA, 17 bp, Arabidopsis thaliana
ttttagcttagccggca

SEQ ID NO: 168933 - DNA, 17 bp, Arabidopsis thaliana
ttttaggctttgtcact

SEQ ID NO: 168934 - DNA, 17 bp, Arabidopsis thaliana
ttttagggattttgctg

SEQ ID NO: 168935 - DNA, 17 bp, Arabidopsis thaliana
ttttaggtcaaacttaa

SEQ ID NO: 168936 - DNA, 17 bp, Arabidopsis thaliana
ttttaggttccggagta

SEQ ID NO: 168937 - DNA, 17 bp, Arabidopsis thaliana
ttttagtcaccagcgac

SEQ ID NO: 168938 - DNA, 17 bp, Arabidopsis thaliana
ttttagtcgcatcctgg

SEQ ID NO: 168939 - DNA, 17 bp, Arabidopsis thaliana
ttttagtcgcatcctgt

SEQ ID NO: 168940 - DNA, 17 bp, Arabidopsis thaliana
ttttagtggattccgga

SEQ ID NO: 168941 - DNA, 17 bp, Arabidopsis thaliana
ttttagttaacgctgcg

SEQ ID NO: 168942 - DNA, 17 bp, Arabidopsis thaliana
ttttagtttcaggatgt

SEQ ID NO: 168943 - DNA, 17 bp, Arabidopsis thaliana
ttttagtttgccggttt

SEQ ID NO: 168944 - DNA, 17 bp, Arabidopsis thaliana
ttttagtttgccgtttt

SEQ ID NO: 168945 - DNA, 17 bp, Arabidopsis thaliana
ttttatcaaataggtca

SEQ ID NO: 168946 - DNA, 17 bp, Arabidopsis thaliana
ttttatcactttggacc

SEQ ID NO: 168947 - DNA, 17 bp, Arabidopsis thaliana
ttttatccagaccactg

SEQ ID NO: 168948 - DNA, 17 bp, Arabidopsis thaliana
ttttatccattcggttt

SEQ ID NO: 168949 - DNA, 17 bp, Arabidopsis thaliana
ttttatccgcagttgaa

SEQ ID NO: 168950 - DNA, 17 bp, Arabidopsis thaliana
ttttatcgaagtcgacc

SEQ ID NO: 168951 - DNA, 17 bp, Arabidopsis thaliana
ttttatcgacgaacacg

SEQ ID NO: 168952 - DNA, 17 bp, Arabidopsis thaliana
ttttatcgtggtgcgcc

SEQ ID NO: 168953 - DNA, 17 bp, Arabidopsis thaliana
ttttatctgcagttgaa

SEQ ID NO: 168954 - DNA, 17 bp, Arabidopsis thaliana
ttttatctttttctgcc

SEQ ID NO: 168955 - DNA, 17 bp, Arabidopsis thaliana
ttttatgagagacttcg

SEQ ID NO: 168956 - DNA, 17 bp, Arabidopsis thaliana
ttttatgccatttgcgt

SEQ ID NO: 168957 - DNA, 17 bp, Arabidopsis thaliana
ttttatggcagaccttt

SEQ ID NO: 168958 - DNA, 17 bp, Arabidopsis thaliana
ttttatgggtttctcag

SEQ ID NO: 168959 - DNA, 17 bp, Arabidopsis thaliana
ttttatgtggacggcat

SEQ ID NO: 168960 - DNA, 17 bp, Arabidopsis thaliana
ttttatgttccggccgg

SEQ ID NO: 168961 - DNA, 17 bp, Arabidopsis thaliana
ttttattcattgcccag

SEQ ID NO: 168962 - DNA, 17 bp, Arabidopsis thaliana
ttttattccgcagacct

SEQ ID NO: 168963 - DNA, 17 bp, Arabidopsis thaliana
ttttattctcacttgca

SEQ ID NO: 168964 - DNA, 17 bp, Arabidopsis thaliana
ttttattgaagctcacc

SEQ ID NO: 168965 - DNA, 17 bp, Arabidopsis thaliana
ttttattgcatgattgc

SEQ ID NO: 168966 - DNA, 17 bp, Arabidopsis thaliana
ttttattggaccgtttt

SEQ ID NO: 168967 - DNA, 17 bp, Arabidopsis thaliana
ttttattgggtgaacga

SEQ ID NO: 168968 - DNA, 17 bp, Arabidopsis thaliana
ttttattgggttccgcg

SEQ ID NO: 168969 - DNA, 17 bp, Arabidopsis thaliana
ttttattgtttgctccg

SEQ ID NO: 168970 - DNA, 17 bp, Arabidopsis thaliana
ttttatttttgggggtc

SEQ ID NO: 168971 - DNA, 17 bp, Arabidopsis thaliana
ttttcaaaactggttcg

SEQ ID NO: 168972 - DNA, 17 bp, Arabidopsis thaliana
ttttcaaaagttcactg

SEQ ID NO: 168973 - DNA, 17 bp, Arabidopsis thaliana
ttttcaaatcaagtcca

SEQ ID NO: 168974 - DNA, 17 bp, Arabidopsis thaliana
ttttcaaatttcgtacg

SEQ ID NO: 168975 - DNA, 17 bp, Arabidopsis thaliana
ttttcaacaacttcgtc

SEQ ID NO: 168976 - DNA, 17 bp, Arabidopsis thaliana
ttttcaacagtcgcggt

SEQ ID NO: 168977 - DNA, 17 bp, Arabidopsis thaliana
ttttcaacagtgtagct

SEQ ID NO: 168978 - DNA, 17 bp, Arabidopsis thaliana
ttttcaacatctgatcg

SEQ ID NO: 168979 - DNA, 17 bp, Arabidopsis thaliana
ttttcaaccaagcgcga

SEQ ID NO: 168980 - DNA, 17 bp, Arabidopsis thaliana
ttttcaaccctttggct

SEQ ID NO: 168981 - DNA, 17 bp, Arabidopsis thaliana
ttttcaaccgattgtgc

SEQ ID NO: 168982 - DNA, 17 bp, Arabidopsis thaliana
ttttcaactttaccctc

SEQ ID NO: 168983 - DNA, 17 bp, Arabidopsis thaliana
ttttcaagaacggagtc

SEQ ID NO: 168984 - DNA, 17 bp, Arabidopsis thaliana
ttttcaagagcaagctc

SEQ ID NO: 168985 - DNA, 17 bp, Arabidopsis thaliana
ttttcaagatctaaccg

SEQ ID NO: 168986 - DNA, 17 bp, Arabidopsis thaliana
ttttcaaggcacagacc

SEQ ID NO: 168987 - DNA, 17 bp, Arabidopsis thaliana
ttttcaaggccaagtcc

SEQ ID NO: 168988 - DNA, 17 bp, Arabidopsis thaliana
ttttcaaggcccaagac

SEQ ID NO: 168989 - DNA, 17 bp, Arabidopsis thaliana
ttttcaagggtatttca

SEQ ID NO: 168990 - DNA, 17 bp, Arabidopsis thaliana
ttttcaaggttcaggca

SEQ ID NO: 168991 - DNA, 17 bp, Arabidopsis thaliana
ttttcaagtcgtctaaa

SEQ ID NO: 168992 - DNA, 17 bp, Arabidopsis thaliana
ttttcaagtggctaaaa

SEQ ID NO: 168993 - DNA, 17 bp, Arabidopsis thaliana
ttttcaatttgttcctt

SEQ ID NO: 168994 - DNA, 17 bp, Arabidopsis thaliana
ttttcaattttccatag

SEQ ID NO: 168995 - DNA, 17 bp, Arabidopsis thaliana
ttttcacaatcgaggat

SEQ ID NO: 168996 - DNA, 17 bp, Arabidopsis thaliana
ttttcacacgagttttt

SEQ ID NO: 168997 - DNA, 17 bp, Arabidopsis thaliana
ttttcaccaccaatcag

SEQ ID NO: 168998 - DNA, 17 bp, Arabidopsis thaliana
ttttcaccatccagatt

SEQ ID NO: 168999 - DNA, 17 bp, Arabidopsis thaliana
ttttcaccatctatttt

SEQ ID NO: 169000 - DNA, 17 bp, Arabidopsis thaliana
ttttcaccattcagacc

SEQ ID NO: 169001 - DNA, 17 bp, Arabidopsis thaliana
ttttcaccattccaact

SEQ ID NO: 169002 - DNA, 17 bp, Arabidopsis thaliana
ttttcaccgttggagat

SEQ ID NO: 169003 - DNA, 17 bp, Arabidopsis thaliana
ttttcacgaggctacat

SEQ ID NO: 169004 - DNA, 17 bp, Arabidopsis thaliana
ttttcacgcaggatttt

SEQ ID NO: 169005 - DNA, 17 bp, Arabidopsis thaliana
ttttcacgccgattctg

SEQ ID NO: 169006 - DNA, 17 bp, Arabidopsis thaliana
ttttcacgggactgagt

SEQ ID NO: 169007 - DNA, 17 bp, Arabidopsis thaliana
ttttcacgtacaaggca

SEQ ID NO: 169008 - DNA, 17 bp, Arabidopsis thaliana
ttttcactacggccctg

SEQ ID NO: 169009 - DNA, 17 bp, Arabidopsis thaliana
ttttcactattagccac

SEQ ID NO: 169010 - DNA, 17 bp, Arabidopsis thaliana
ttttcactcacacagtt

SEQ ID NO: 169011 - DNA, 17 bp, Arabidopsis thaliana
ttttcactctcctccgc

SEQ ID NO: 169012 - DNA, 17 bp, Arabidopsis thaliana
ttttcactgtttgattc

SEQ ID NO: 169013 - DNA, 17 bp, Arabidopsis thaliana
ttttcacttctcgactt

SEQ ID NO: 169014 - DNA, 17 bp, Arabidopsis thaliana
ttttcactttgttgtgc

SEQ ID NO: 169015 - DNA, 17 bp, Arabidopsis thaliana
ttttcactttgttgtgt

SEQ ID NO: 169016 - DNA, 17 bp, Arabidopsis thaliana
ttttcagaaagcccaaa

SEQ ID NO: 169017 - DNA, 17 bp, Arabidopsis thaliana
ttttcagacctaacatc

SEQ ID NO: 169018 - DNA, 17 bp, Arabidopsis thaliana
ttttcagagaccaaaaa

SEQ ID NO: 169019 - DNA, 17 bp, Arabidopsis thaliana
ttttcagagatgaggca

SEQ ID NO: 169020 - DNA, 17 bp, Arabidopsis thaliana
ttttcagagcgcagttt

SEQ ID NO: 169021 - DNA, 17 bp, Arabidopsis thaliana
ttttcagagtcaccaaa

SEQ ID NO: 169022 - DNA, 17 bp, Arabidopsis thaliana
ttttcagccctttgtcg

SEQ ID NO: 169023 - DNA, 17 bp, Arabidopsis thaliana
ttttcagcctctgcttc

SEQ ID NO: 169024 - DNA, 17 bp, Arabidopsis thaliana
ttttcagcctttgcgca

SEQ ID NO: 169025 - DNA, 17 bp, Arabidopsis thaliana
ttttcagcgacatctcc

SEQ ID NO: 169026 - DNA, 17 bp, Arabidopsis thaliana
ttttcagcgcaagaaga

SEQ ID NO: 169027 - DNA, 17 bp, Arabidopsis thaliana
ttttcagctaacgttgc

SEQ ID NO: 169028 - DNA, 17 bp, Arabidopsis thaliana
ttttcagctctgggtcc

SEQ ID NO: 169029 - DNA, 17 bp, Arabidopsis thaliana
ttttcaggatctgtgct

SEQ ID NO: 169030 - DNA, 17 bp, Arabidopsis thaliana
ttttcaggattaggatg

SEQ ID NO: 169031 - DNA, 17 bp, Arabidopsis thaliana
ttttcaggattatgggc

SEQ ID NO: 169032 - DNA, 17 bp, Arabidopsis thaliana
ttttcaggcctttcgtg

SEQ ID NO: 169033 - DNA, 17 bp, Arabidopsis thaliana
ttttcagggatgaagca

SEQ ID NO: 169034 - DNA, 17 bp, Arabidopsis thaliana
ttttcagggatgagaca

SEQ ID NO: 169035 - DNA, 17 bp, Arabidopsis thaliana
ttttcagggatgaggca

SEQ ID NO: 169036 - DNA, 17 bp, Arabidopsis thaliana
ttttcagggatgaggga

SEQ ID NO: 169037 - DNA, 17 bp, Arabidopsis thaliana
ttttcagtacgaatacg

SEQ ID NO: 169038 - DNA, 17 bp, Arabidopsis thaliana
ttttcagtacgaatatt

SEQ ID NO: 169039 - DNA, 17 bp, Arabidopsis thaliana
ttttcagtcgtcagcga

SEQ ID NO: 169040 - DNA, 17 bp, Arabidopsis thaliana
ttttcagttcacttgga

SEQ ID NO: 169041 - DNA, 17 bp, Arabidopsis thaliana
ttttcagttcgatttcc

SEQ ID NO: 169042 - DNA, 17 bp, Arabidopsis thaliana
ttttcagttgacggttc

SEQ ID NO: 169043 - DNA, 17 bp, Arabidopsis thaliana
ttttcagtttgatttcc

SEQ ID NO: 169044 - DNA, 17 bp, Arabidopsis thaliana
ttttcagttttactctg

SEQ ID NO: 169045 - DNA, 17 bp, Arabidopsis thaliana
ttttcataagtgaggca

SEQ ID NO: 169046 - DNA, 17 bp, Arabidopsis thaliana
ttttcatacaggggacc

SEQ ID NO: 169047 - DNA, 17 bp, Arabidopsis thaliana
ttttcatagcagaatga

SEQ ID NO: 169048 - DNA, 17 bp, Arabidopsis thaliana
ttttcatagccttcgta

SEQ ID NO: 169049 - DNA, 17 bp, Arabidopsis thaliana
ttttcataggatcgtgt

SEQ ID NO: 169050 - DNA, 17 bp, Arabidopsis thaliana
ttttcatcatgtctcaa

SEQ ID NO: 169051 - DNA, 17 bp, Arabidopsis thaliana
ttttcatccacgcataa

SEQ ID NO: 169052 - DNA, 17 bp, Arabidopsis thaliana
ttttcatccgtgacaag

SEQ ID NO: 169053 - DNA, 17 bp, Arabidopsis thaliana
ttttcatcctcttactc

SEQ ID NO: 169054 - DNA, 17 bp, Arabidopsis thaliana
ttttcatcctgtgagtc

SEQ ID NO: 169055 - DNA, 17 bp, Arabidopsis thaliana
ttttcatcgaatctttg

SEQ ID NO: 169056 - DNA, 17 bp, Arabidopsis thaliana
ttttcatcgaccattca

SEQ ID NO: 169057 - DNA, 17 bp, Arabidopsis thaliana
ttttcatctaatttgga

SEQ ID NO: 169058 - DNA, 17 bp, Arabidopsis thaliana
ttttcatctataccgca

SEQ ID NO: 169059 - DNA, 17 bp, Arabidopsis thaliana
ttttcatctcaggcgtc

SEQ ID NO: 169060 - DNA, 17 bp, Arabidopsis thaliana
ttttcatctccatgtcg

SEQ ID NO: 169061 - DNA, 17 bp, Arabidopsis thaliana
ttttcatctgtggtgtc

SEQ ID NO: 169062 - DNA, 17 bp, Arabidopsis thaliana
ttttcatcttgcctccc

SEQ ID NO: 169063 - DNA, 17 bp, Arabidopsis thaliana
ttttcatcttggcctca

SEQ ID NO: 169064 - DNA, 17 bp, Arabidopsis thaliana
ttttcatgagattcaca

SEQ ID NO: 169065 - DNA, 17 bp, Arabidopsis thaliana
ttttcatgcagtgtacc

SEQ ID NO: 169066 - DNA, 17 bp, Arabidopsis thaliana
ttttcatgcgaaccagg

SEQ ID NO: 169067 - DNA, 17 bp, Arabidopsis thaliana
ttttcatgcgcttgatg

SEQ ID NO: 169068 - DNA, 17 bp, Arabidopsis thaliana
ttttcatggagctgttt

SEQ ID NO: 169069 - DNA, 17 bp, Arabidopsis thaliana
ttttcatgtgatggatg

SEQ ID NO: 169070 - DNA, 17 bp, Arabidopsis thaliana
ttttcatgtgcaatgca

SEQ ID NO: 169071 - DNA, 17 bp, Arabidopsis thaliana
ttttcatgtgtgtgatc

SEQ ID NO: 169072 - DNA, 17 bp, Arabidopsis thaliana
ttttcattctcagatat

SEQ ID NO: 169073 - DNA, 17 bp, Arabidopsis thaliana
ttttcatttctcgttcc

SEQ ID NO: 169074 - DNA, 17 bp, Arabidopsis thaliana
ttttcatttgctgtgct

SEQ ID NO: 169075 - DNA, 17 bp, Arabidopsis thaliana
ttttcatttgtgtggac

SEQ ID NO: 169076 - DNA, 17 bp, Arabidopsis thaliana
ttttccaaacacatttt

SEQ ID NO: 169077 - DNA, 17 bp, Arabidopsis thaliana
ttttccaaagttgtgtg

SEQ ID NO: 169078 - DNA, 17 bp, Arabidopsis thaliana
ttttccaacagctccat

SEQ ID NO: 169079 - DNA, 17 bp, Arabidopsis thaliana
ttttccaaccttgtgac

SEQ ID NO: 169080 - DNA, 17 bp, Arabidopsis thaliana
ttttccaagcaggactg

SEQ ID NO: 169081 - DNA, 17 bp, Arabidopsis thaliana
ttttccaatacgatgtt

SEQ ID NO: 169082 - DNA, 17 bp, Arabidopsis thaliana
ttttccaatgaggctgt

SEQ ID NO: 169083 - DNA, 17 bp, Arabidopsis thaliana
ttttccaattcccctag

SEQ ID NO: 169084 - DNA, 17 bp, Arabidopsis thaliana
ttttccacaatgtgtat

SEQ ID NO: 169085 - DNA, 17 bp, Arabidopsis thaliana
ttttccacattttccac

SEQ ID NO: 169086 - DNA, 17 bp, Arabidopsis thaliana
ttttccaccatctttgc

SEQ ID NO: 169087 - DNA, 17 bp, Arabidopsis thaliana
ttttccactatcctggg

SEQ ID NO: 169088 - DNA, 17 bp, Arabidopsis thaliana
ttttccactcttggtta

SEQ ID NO: 169089 - DNA, 17 bp, Arabidopsis thaliana
ttttccagaccgtttgc

SEQ ID NO: 169090 - DNA, 17 bp, Arabidopsis thaliana
ttttccagattattgct

SEQ ID NO: 169091 - DNA, 17 bp, Arabidopsis thaliana
ttttccaggtcagacca

SEQ ID NO: 169092 - DNA, 17 bp, Arabidopsis thaliana
ttttccagtgattcggg

SEQ ID NO: 169093 - DNA, 17 bp, Arabidopsis thaliana
ttttccagtttcagtgt

SEQ ID NO: 169094 - DNA, 17 bp, Arabidopsis thaliana
ttttccatagactgcga

SEQ ID NO: 169095 - DNA, 17 bp, Arabidopsis thaliana
ttttccatctcggcttt

SEQ ID NO: 169096 - DNA, 17 bp, Arabidopsis thaliana
ttttccatgcgcttgat

SEQ ID NO: 169097 - DNA, 17 bp, Arabidopsis thaliana
ttttccattcttcaaac

SEQ ID NO: 169098 - DNA, 17 bp, Arabidopsis thaliana
ttttccattgacttttt

SEQ ID NO: 169099 - DNA, 17 bp, Arabidopsis thaliana
ttttccatttccatttc

SEQ ID NO: 169100 - DNA, 17 bp, Arabidopsis thaliana
ttttcccaagcatagtc

SEQ ID NO: 169101 - DNA, 17 bp, Arabidopsis thaliana
ttttcccaaggcgacct

SEQ ID NO: 169102 - DNA, 17 bp, Arabidopsis thaliana
ttttcccctaaaccgcg

SEQ ID NO: 169103 - DNA, 17 bp, Arabidopsis thaliana
ttttcccgcaaaactta

SEQ ID NO: 169104 - DNA, 17 bp, Arabidopsis thaliana
ttttcccgccaaaactt

SEQ ID NO: 169105 - DNA, 17 bp, Arabidopsis thaliana
ttttcccgtaccgcaaa

SEQ ID NO: 169106 - DNA, 17 bp, Arabidopsis thaliana
ttttccctacatagcgg

SEQ ID NO: 169107 - DNA, 17 bp, Arabidopsis thaliana
ttttccctcctaaccgt

SEQ ID NO: 169108 - DNA, 17 bp, Arabidopsis thaliana
ttttccctctgccaccc

SEQ ID NO: 169109 - DNA, 17 bp, Arabidopsis thaliana
ttttccctcttggcacc

SEQ ID NO: 169110 - DNA, 17 bp, Arabidopsis thaliana
ttttccctttgtcgaga

SEQ ID NO: 169111 - DNA, 17 bp, Arabidopsis thaliana
ttttccgaaagccaaaa

SEQ ID NO: 169112 - DNA, 17 bp, Arabidopsis thaliana
ttttccgaaggaccacc

SEQ ID NO: 169113 - DNA, 17 bp, Arabidopsis thaliana
ttttccgacaacgtggg

SEQ ID NO: 169114 - DNA, 17 bp, Arabidopsis thaliana
ttttccgaccttgtgac

SEQ ID NO: 169115 - DNA, 17 bp, Arabidopsis thaliana
ttttccgacgcaaattt

SEQ ID NO: 169116 - DNA, 17 bp, Arabidopsis thaliana
ttttccgacgccagtgt

SEQ ID NO: 169117 - DNA, 17 bp, Arabidopsis thaliana
ttttccgacgggttacc

SEQ ID NO: 169118 - DNA, 17 bp, Arabidopsis thaliana
ttttccgagatgtatgc

SEQ ID NO: 169119 - DNA, 17 bp, Arabidopsis thaliana
ttttccgcagttgaacc

SEQ ID NO: 169120 - DNA, 17 bp, Arabidopsis thaliana
ttttccgcatcagttta

SEQ ID NO: 169121 - DNA, 17 bp, Arabidopsis thaliana
ttttccgccaaaaccgc

SEQ ID NO: 169122 - DNA, 17 bp, Arabidopsis thaliana
ttttccgccaagatttg

SEQ ID NO: 169123 - DNA, 17 bp, Arabidopsis thaliana
ttttccgccattcttgt

SEQ ID NO: 169124 - DNA, 17 bp, Arabidopsis thaliana
ttttccgccgaatccct

SEQ ID NO: 169125 - DNA, 17 bp, Arabidopsis thaliana
ttttccgccgttgatct

SEQ ID NO: 169126 - DNA, 17 bp, Arabidopsis thaliana
ttttccgcgccaaaatg

SEQ ID NO: 169127 - DNA, 17 bp, Arabidopsis thaliana
ttttccgcggccgttcc

SEQ ID NO: 169128 - DNA, 17 bp, Arabidopsis thaliana
ttttccgcggtcgttcc

SEQ ID NO: 169129 - DNA, 17 bp, Arabidopsis thaliana
ttttccgcgtctgcttt

SEQ ID NO: 169130 - DNA, 17 bp, Arabidopsis thaliana
ttttccgctgactaaga

SEQ ID NO: 169131 - DNA, 17 bp, Arabidopsis thaliana
ttttccgcttcgtgccc

SEQ ID NO: 169132 - DNA, 17 bp, Arabidopsis thaliana
ttttccggattgtattg

SEQ ID NO: 169133 - DNA, 17 bp, Arabidopsis thaliana
ttttccggattttattc

SEQ ID NO: 169134 - DNA, 17 bp, Arabidopsis thaliana
ttttccggcgagtcttt

SEQ ID NO: 169135 - DNA, 17 bp, Arabidopsis thaliana
ttttccggcgatcgatt

SEQ ID NO: 169136 - DNA, 17 bp, Arabidopsis thaliana
ttttccggtcagccccg

SEQ ID NO: 169137 - DNA, 17 bp, Arabidopsis thaliana
ttttccggtcgggtgga

SEQ ID NO: 169138 - DNA, 17 bp, Arabidopsis thaliana
ttttccggttcacgggt

SEQ ID NO: 169139 - DNA, 17 bp, Arabidopsis thaliana
ttttccgtcagcggtgc

SEQ ID NO: 169140 - DNA, 17 bp, Arabidopsis thaliana
ttttccgtcgcttagac

SEQ ID NO: 169141 - DNA, 17 bp, Arabidopsis thaliana
ttttccgtgtggacaat

SEQ ID NO: 169142 - DNA, 17 bp, Arabidopsis thaliana
ttttccgttctgtattt

SEQ ID NO: 169143 - DNA, 17 bp, Arabidopsis thaliana
ttttccgttcttgaacc

SEQ ID NO: 169144 - DNA, 17 bp, Arabidopsis thaliana
ttttccgtttcctaagg

SEQ ID NO: 169145 - DNA, 17 bp, Arabidopsis thaliana
ttttcctaccattgcga

SEQ ID NO: 169146 - DNA, 17 bp, Arabidopsis thaliana
ttttcctacgagaacta

SEQ ID NO: 169147 - DNA, 17 bp, Arabidopsis thaliana
ttttcctactccgccca

SEQ ID NO: 169148 - DNA, 17 bp, Arabidopsis thaliana
ttttcctcagtaggatc

SEQ ID NO: 169149 - DNA, 17 bp, Arabidopsis thaliana
ttttcctcatcgattgg

SEQ ID NO: 169150 - DNA, 17 bp, Arabidopsis thaliana
ttttcctccatatgtgg

SEQ ID NO: 169151 - DNA, 17 bp, Arabidopsis thaliana
ttttcctccgcttattg

SEQ ID NO: 169152 - DNA, 17 bp, Arabidopsis thaliana
ttttcctccgcttattt

SEQ ID NO: 169153 - DNA, 17 bp, Arabidopsis thaliana
ttttcctcgaaataggc

SEQ ID NO: 169154 - DNA, 17 bp, Arabidopsis thaliana
ttttcctcgcaaaacga

SEQ ID NO: 169155 - DNA, 17 bp, Arabidopsis thaliana
ttttcctcgttagtgcc

SEQ ID NO: 169156 - DNA, 17 bp, Arabidopsis thaliana
ttttcctctaatgcgat

SEQ ID NO: 169157 - DNA, 17 bp, Arabidopsis thaliana
ttttcctctcgctcggt

SEQ ID NO: 169158 - DNA, 17 bp, Arabidopsis thaliana
ttttcctgcattaagct

SEQ ID NO: 169159 - DNA, 17 bp, Arabidopsis thaliana
ttttcctgccaaaattg

SEQ ID NO: 169160 - DNA, 17 bp, Arabidopsis thaliana
ttttcctggatgtagct

SEQ ID NO: 169161 - DNA, 17 bp, Arabidopsis thaliana
ttttcctgtaatctctc

SEQ ID NO: 169162 - DNA, 17 bp, Arabidopsis thaliana
ttttcctgtgaatttgc

SEQ ID NO: 169163 - DNA, 17 bp, Arabidopsis thaliana
ttttccttctgcgcttc

SEQ ID NO: 169164 - DNA, 17 bp, Arabidopsis thaliana
ttttccttcttggcacc

SEQ ID NO: 169165 - DNA, 17 bp, Arabidopsis thaliana
ttttcctttgaatctcg

SEQ ID NO: 169166 - DNA, 17 bp, Arabidopsis thaliana
ttttcgaagagtgccac

SEQ ID NO: 169167 - DNA, 17 bp, Arabidopsis thaliana
ttttcgacaactatacc

SEQ ID NO: 169168 - DNA, 17 bp, Arabidopsis thaliana
ttttcgacggcattacg

SEQ ID NO: 169169 - DNA, 17 bp, Arabidopsis thaliana
ttttcgacggcccgacc

SEQ ID NO: 169170 - DNA, 17 bp, Arabidopsis thaliana
ttttcgactaatgccag

SEQ ID NO: 169171 - DNA, 17 bp, Arabidopsis thaliana
ttttcgaggccaagctc

SEQ ID NO: 169172 - DNA, 17 bp, Arabidopsis thaliana
ttttcgatgtataccag

SEQ ID NO: 169173 - DNA, 17 bp, Arabidopsis thaliana
ttttcgatgtataccta

SEQ ID NO: 169174 - DNA, 17 bp, Arabidopsis thaliana
ttttcgatgtctaccaa

SEQ ID NO: 169175 - DNA, 17 bp, Arabidopsis thaliana
ttttcgatgtctaccag

SEQ ID NO: 169176 - DNA, 17 bp, Arabidopsis thaliana
ttttcgatgtctacctg

SEQ ID NO: 169177 - DNA, 17 bp, Arabidopsis thaliana
ttttcgatgtttaccag

SEQ ID NO: 169178 - DNA, 17 bp, Arabidopsis thaliana
ttttcgattcgggtttt

SEQ ID NO: 169179 - DNA, 17 bp, Arabidopsis thaliana
ttttcgcacagttccga

SEQ ID NO: 169180 - DNA, 17 bp, Arabidopsis thaliana
ttttcgcactgaatcga

SEQ ID NO: 169181 - DNA, 17 bp, Arabidopsis thaliana
ttttcgcagatagtggc

SEQ ID NO: 169182 - DNA, 17 bp, Arabidopsis thaliana
ttttcgcagcaaatcaa

SEQ ID NO: 169183 - DNA, 17 bp, Arabidopsis thaliana
ttttcgcaggtcaactt

SEQ ID NO: 169184 - DNA, 17 bp, Arabidopsis thaliana
ttttcgcagtctttgat

SEQ ID NO: 169185 - DNA, 17 bp, Arabidopsis thaliana
ttttcgcatagtgagaa

SEQ ID NO: 169186 - DNA, 17 bp, Arabidopsis thaliana
ttttcgcattatacgaa

SEQ ID NO: 169187 - DNA, 17 bp, Arabidopsis thaliana
ttttcgccatctatttt

SEQ ID NO: 169188 - DNA, 17 bp, Arabidopsis thaliana
ttttcgccgtctgagca

SEQ ID NO: 169189 - DNA, 17 bp, Arabidopsis thaliana
ttttcgcctactctaca

SEQ ID NO: 169190 - DNA, 17 bp, Arabidopsis thaliana
ttttcgcctgcaaaatg

SEQ ID NO: 169191 - DNA, 17 bp, Arabidopsis thaliana
ttttcgcctgtgagaaa

SEQ ID NO: 169192 - DNA, 17 bp, Arabidopsis thaliana
ttttcgcgaattaccgg

SEQ ID NO: 169193 - DNA, 17 bp, Arabidopsis thaliana
ttttcgcgatttgtgct

SEQ ID NO: 169194 - DNA, 17 bp, Arabidopsis thaliana
ttttcgcgccaagctat

SEQ ID NO: 169195 - DNA, 17 bp, Arabidopsis thaliana
ttttcgcggtaaatgtt

SEQ ID NO: 169196 - DNA, 17 bp, Arabidopsis thaliana
ttttcgctatccatcct

SEQ ID NO: 169197 - DNA, 17 bp, Arabidopsis thaliana
ttttcgctcagtgacta

SEQ ID NO: 169198 - DNA, 17 bp, Arabidopsis thaliana
ttttcgctgaaccaatg

SEQ ID NO: 169199 - DNA, 17 bp, Arabidopsis thaliana
ttttcgctgatctggag

SEQ ID NO: 169200 - DNA, 17 bp, Arabidopsis thaliana
ttttcgctttacccact

SEQ ID NO: 169201 - DNA, 17 bp, Arabidopsis thaliana
ttttcgctttcggatct

SEQ ID NO: 169202 - DNA, 17 bp, Arabidopsis thaliana
ttttcggaccaagagaa

SEQ ID NO: 169203 - DNA, 17 bp, Arabidopsis thaliana
ttttcggacgaaaattt

SEQ ID NO: 169204 - DNA, 17 bp, Arabidopsis thaliana
ttttcggcaagatattg

SEQ ID NO: 169205 - DNA, 17 bp, Arabidopsis thaliana
ttttcggccactgaaac

SEQ ID NO: 169206 - DNA, 17 bp, Arabidopsis thaliana
ttttcggcctctaaatc

SEQ ID NO: 169207 - DNA, 17 bp, Arabidopsis thaliana
ttttcggcgaaggagtt

SEQ ID NO: 169208 - DNA, 17 bp, Arabidopsis thaliana
ttttcggcggcagaact

SEQ ID NO: 169209 - DNA, 17 bp, Arabidopsis thaliana
ttttcggcgggaaaatc

SEQ ID NO: 169210 - DNA, 17 bp, Arabidopsis thaliana
ttttcggcgtaagacct

SEQ ID NO: 169211 - DNA, 17 bp, Arabidopsis thaliana
ttttcggctcggcaaga

SEQ ID NO: 169212 - DNA, 17 bp, Arabidopsis thaliana
ttttcgggattcgttaa

SEQ ID NO: 169213 - DNA, 17 bp, Arabidopsis thaliana
ttttcgggcattttcgg

SEQ ID NO: 169214 - DNA, 17 bp, Arabidopsis thaliana
ttttcgggcattttcgt

SEQ ID NO: 169215 - DNA, 17 bp, Arabidopsis thaliana
ttttcgggccggttcgt

SEQ ID NO: 169216 - DNA, 17 bp, Arabidopsis thaliana
ttttcgggcctgaaagt

SEQ ID NO: 169217 - DNA, 17 bp, Arabidopsis thaliana
ttttcgggccttttcgt

SEQ ID NO: 169218 - DNA, 17 bp, Arabidopsis thaliana
ttttcggggtttatcac

SEQ ID NO: 169219 - DNA, 17 bp, Arabidopsis thaliana
ttttcgggtctaaatat

SEQ ID NO: 169220 - DNA, 17 bp, Arabidopsis thaliana
ttttcgggttcggtttc

SEQ ID NO: 169221 - DNA, 17 bp, Arabidopsis thaliana
ttttcggtccagttcgc

SEQ ID NO: 169222 - DNA, 17 bp, Arabidopsis thaliana
ttttcggttctccgttc

SEQ ID NO: 169223 - DNA, 17 bp, Arabidopsis thaliana
ttttcgtacaatcttat

SEQ ID NO: 169224 - DNA, 17 bp, Arabidopsis thaliana
ttttcgtaggacctaac

SEQ ID NO: 169225 - DNA, 17 bp, Arabidopsis thaliana
ttttcgtatgtggccgt

SEQ ID NO: 169226 - DNA, 17 bp, Arabidopsis thaliana
ttttcgtcattggtaat

SEQ ID NO: 169227 - DNA, 17 bp, Arabidopsis thaliana
ttttcgtccgacttcag

SEQ ID NO: 169228 - DNA, 17 bp, Arabidopsis thaliana
ttttcgtcggaggactg

SEQ ID NO: 169229 - DNA, 17 bp, Arabidopsis thaliana
ttttcgtcggagggctg

SEQ ID NO: 169230 - DNA, 17 bp, Arabidopsis thaliana
ttttcgtctaaacccta

SEQ ID NO: 169231 - DNA, 17 bp, Arabidopsis thaliana
ttttcgtctccggattg

SEQ ID NO: 169232 - DNA, 17 bp, Arabidopsis thaliana
ttttcgtctgatgtcca

SEQ ID NO: 169233 - DNA, 17 bp, Arabidopsis thaliana
ttttcgtcttcaacgga

SEQ ID NO: 169234 - DNA, 17 bp, Arabidopsis thaliana
ttttcgtcttcaacggg

SEQ ID NO: 169235 - DNA, 17 bp, Arabidopsis thaliana
ttttcgtcttcgagcgt

SEQ ID NO: 169236 - DNA, 17 bp, Arabidopsis thaliana
ttttcgtcttgtccaat

SEQ ID NO: 169237 - DNA, 17 bp, Arabidopsis thaliana
ttttcgtctttgacaga

SEQ ID NO: 169238 - DNA, 17 bp, Arabidopsis thaliana
ttttcgtgattcccctc

SEQ ID NO: 169239 - DNA, 17 bp, Arabidopsis thaliana
ttttcgtgatttgtgct

SEQ ID NO: 169240 - DNA, 17 bp, Arabidopsis thaliana
ttttcgtgccaaatagt

SEQ ID NO: 169241 - DNA, 17 bp, Arabidopsis thaliana
ttttcgtgccaagttat

SEQ ID NO: 169242 - DNA, 17 bp, Arabidopsis thaliana
ttttcgtgccaagttgt

SEQ ID NO: 169243 - DNA, 17 bp, Arabidopsis thaliana
ttttcgtgtcaatttgt

SEQ ID NO: 169244 - DNA, 17 bp, Arabidopsis thaliana
ttttcgtgtgcaggcca

SEQ ID NO: 169245 - DNA, 17 bp, Arabidopsis thaliana
ttttcgtgtttcgactg

SEQ ID NO: 169246 - DNA, 17 bp, Arabidopsis thaliana
ttttcgttagtgactgc

SEQ ID NO: 169247 - DNA, 17 bp, Arabidopsis thaliana
ttttcgttccagagcaa

SEQ ID NO: 169248 - DNA, 17 bp, Arabidopsis thaliana
ttttcgttggcagtaga

SEQ ID NO: 169249 - DNA, 17 bp, Arabidopsis thaliana
ttttcgtttgccgtggc

SEQ ID NO: 169250 - DNA, 17 bp, Arabidopsis thaliana
ttttcgtttttggcggg

SEQ ID NO: 169251 - DNA, 17 bp, Arabidopsis thaliana
ttttctaacaaccatca

SEQ ID NO: 169252 - DNA, 17 bp, Arabidopsis thaliana
ttttctacattattgct

SEQ ID NO: 169253 - DNA, 17 bp, Arabidopsis thaliana
ttttctacattcagagc

SEQ ID NO: 169254 - DNA, 17 bp, Arabidopsis thaliana
ttttctactatcctggg

SEQ ID NO: 169255 - DNA, 17 bp, Arabidopsis thaliana
ttttctactcaatgtca

SEQ ID NO: 169256 - DNA, 17 bp, Arabidopsis thaliana
ttttctagaggcgggct

SEQ ID NO: 169257 - DNA, 17 bp, Arabidopsis thaliana
ttttctagctggttgac

SEQ ID NO: 169258 - DNA, 17 bp, Arabidopsis thaliana
ttttctaggattctttc

SEQ ID NO: 169259 - DNA, 17 bp, Arabidopsis thaliana
ttttctatcgacatcgc

SEQ ID NO: 169260 - DNA, 17 bp, Arabidopsis thaliana
ttttctattcatgcaac

SEQ ID NO: 169261 - DNA, 17 bp, Arabidopsis thaliana
ttttctatttccgacgg

SEQ ID NO: 169262 - DNA, 17 bp, Arabidopsis thaliana
ttttctcaaataggtca

SEQ ID NO: 169263 - DNA, 17 bp, Arabidopsis thaliana
ttttctcaatttcatcg

SEQ ID NO: 169264 - DNA, 17 bp, Arabidopsis thaliana
ttttctcagcagtgttc

SEQ ID NO: 169265 - DNA, 17 bp, Arabidopsis thaliana
ttttctcaggagagtga

SEQ ID NO: 169266 - DNA, 17 bp, Arabidopsis thaliana
ttttctcatcagtgttc

SEQ ID NO: 169267 - DNA, 17 bp, Arabidopsis thaliana
ttttctcatcgccacct

SEQ ID NO: 169268 - DNA, 17 bp, Arabidopsis thaliana
ttttctcccaccgacgc

SEQ ID NO: 169269 - DNA, 17 bp, Arabidopsis thaliana
ttttctccctgatctgg

SEQ ID NO: 169270 - DNA, 17 bp, Arabidopsis thaliana
ttttctccgacttcgcc

SEQ ID NO: 169271 - DNA, 17 bp, Arabidopsis thaliana
ttttctccggtgttgct

SEQ ID NO: 169272 - DNA, 17 bp, Arabidopsis thaliana
ttttctccgtccgtcgg

SEQ ID NO: 169273 - DNA, 17 bp, Arabidopsis thaliana
ttttctcctctttcgcg

SEQ ID NO: 169274 - DNA, 17 bp, Arabidopsis thaliana
ttttctcctttggcact

SEQ ID NO: 169275 - DNA, 17 bp, Arabidopsis thaliana
ttttctcgagtctcaga

SEQ ID NO: 169276 - DNA, 17 bp, Arabidopsis thaliana
ttttctcgcaagacctt

SEQ ID NO: 169277 - DNA, 17 bp, Arabidopsis thaliana
ttttctcgctgtgataa

SEQ ID NO: 169278 - DNA, 17 bp, Arabidopsis thaliana
ttttctcggaccctggg

SEQ ID NO: 169279 - DNA, 17 bp, Arabidopsis thaliana
ttttctcggtttctact

SEQ ID NO: 169280 - DNA, 17 bp, Arabidopsis thaliana
ttttctcgtttaaaccg

SEQ ID NO: 169281 - DNA, 17 bp, Arabidopsis thaliana
ttttctctagcgcatag

SEQ ID NO: 169282 - DNA, 17 bp, Arabidopsis thaliana
ttttctctatctttgct

SEQ ID NO: 169283 - DNA, 17 bp, Arabidopsis thaliana
ttttctctatgtgcaac

SEQ ID NO: 169284 - DNA, 17 bp, Arabidopsis thaliana
ttttctctcgatgagca

SEQ ID NO: 169285 - DNA, 17 bp, Arabidopsis thaliana
ttttctctcttgggtcc

SEQ ID NO: 169286 - DNA, 17 bp, Arabidopsis thaliana
ttttctctgcttctgcc

SEQ ID NO: 169287 - DNA, 17 bp, Arabidopsis thaliana
ttttctctggaactagt

SEQ ID NO: 169288 - DNA, 17 bp, Arabidopsis thaliana
ttttctgaactctcaaa

SEQ ID NO: 169289 - DNA, 17 bp, Arabidopsis thaliana
ttttctgaccatgggat

SEQ ID NO: 169290 - DNA, 17 bp, Arabidopsis thaliana
ttttctgacgaagatcc

SEQ ID NO: 169291 - DNA, 17 bp, Arabidopsis thaliana
ttttctgacggaccgat

SEQ ID NO: 169292 - DNA, 17 bp, Arabidopsis thaliana
ttttctgagcctgccaa

SEQ ID NO: 169293 - DNA, 17 bp, Arabidopsis thaliana
ttttctgaggcttccag

SEQ ID NO: 169294 - DNA, 17 bp, Arabidopsis thaliana
ttttctgatcgctgcgg

SEQ ID NO: 169295 - DNA, 17 bp, Arabidopsis thaliana
ttttctgcaaagatctg

SEQ ID NO: 169296 - DNA, 17 bp, Arabidopsis thaliana
ttttctgccctaagcgc

SEQ ID NO: 169297 - DNA, 17 bp, Arabidopsis thaliana
ttttctgccgaataaca

SEQ ID NO: 169298 - DNA, 17 bp, Arabidopsis thaliana
ttttctgcctgggtgtc

SEQ ID NO: 169299 - DNA, 17 bp, Arabidopsis thaliana
ttttctgcgacttcgac

SEQ ID NO: 169300 - DNA, 17 bp, Arabidopsis thaliana
ttttctgctaagatcgc

SEQ ID NO: 169301 - DNA, 17 bp, Arabidopsis thaliana
ttttctggacacgttct

SEQ ID NO: 169302 - DNA, 17 bp, Arabidopsis thaliana
ttttctggatattcgct

SEQ ID NO: 169303 - DNA, 17 bp, Arabidopsis thaliana
ttttctggattgggctt

SEQ ID NO: 169304 - DNA, 17 bp, Arabidopsis thaliana
ttttctgggttcggcga

SEQ ID NO: 169305 - DNA, 17 bp, Arabidopsis thaliana
ttttctgggtttcggcg

SEQ ID NO: 169306 - DNA, 17 bp, Arabidopsis thaliana
ttttctggtgtcctagg

SEQ ID NO: 169307 - DNA, 17 bp, Arabidopsis thaliana
ttttctggttacgacat

SEQ ID NO: 169308 - DNA, 17 bp, Arabidopsis thaliana
ttttctggttgacaacc

SEQ ID NO: 169309 - DNA, 17 bp, Arabidopsis thaliana
ttttctgtaggcggtct

SEQ ID NO: 169310 - DNA, 17 bp, Arabidopsis thaliana
ttttctgtagtccaacg

SEQ ID NO: 169311 - DNA, 17 bp, Arabidopsis thaliana
ttttctgtcaaccaaac

SEQ ID NO: 169312 - DNA, 17 bp, Arabidopsis thaliana
ttttctgtcagttgggc

SEQ ID NO: 169313 - DNA, 17 bp, Arabidopsis thaliana
ttttctgtcgcgatgtt

SEQ ID NO: 169314 - DNA, 17 bp, Arabidopsis thaliana
ttttctgtctgttactc

SEQ ID NO: 169315 - DNA, 17 bp, Arabidopsis thaliana
ttttctgtcttgtaatg

SEQ ID NO: 169316 - DNA, 17 bp, Arabidopsis thaliana
ttttctgtttaacagcc

SEQ ID NO: 169317 - DNA, 17 bp, Arabidopsis thaliana
ttttcttacttaaggac

SEQ ID NO: 169318 - DNA, 17 bp, Arabidopsis thaliana
ttttcttagccttcatt

SEQ ID NO: 169319 - DNA, 17 bp, Arabidopsis thaliana
ttttcttagggtcatcg

SEQ ID NO: 169320 - DNA, 17 bp, Arabidopsis thaliana
ttttcttcaaccgtctt

SEQ ID NO: 169321 - DNA, 17 bp, Arabidopsis thaliana
ttttcttcaccccatcg

SEQ ID NO: 169322 - DNA, 17 bp, Arabidopsis thaliana
ttttcttcagaggcttc

SEQ ID NO: 169323 - DNA, 17 bp, Arabidopsis thaliana
ttttcttccaccgcacg

SEQ ID NO: 169324 - DNA, 17 bp, Arabidopsis thaliana
ttttcttcctgtgatca

SEQ ID NO: 169325 - DNA, 17 bp, Arabidopsis thaliana
ttttcttccttgccatg

SEQ ID NO: 169326 - DNA, 17 bp, Arabidopsis thaliana
ttttcttccttgtgctc

SEQ ID NO: 169327 - DNA, 17 bp, Arabidopsis thaliana
ttttcttcgaatcgttg

SEQ ID NO: 169328 - DNA, 17 bp, Arabidopsis thaliana
ttttcttcggagtgaaa

SEQ ID NO: 169329 - DNA, 17 bp, Arabidopsis thaliana
ttttcttcggcgttcga

SEQ ID NO: 169330 - DNA, 17 bp, Arabidopsis thaliana
ttttcttctgcgattag

SEQ ID NO: 169331 - DNA, 17 bp, Arabidopsis thaliana
ttttcttcttagccgag

SEQ ID NO: 169332 - DNA, 17 bp, Arabidopsis thaliana
ttttcttcttcctaggg

SEQ ID NO: 169333 - DNA, 17 bp, Arabidopsis thaliana
ttttcttgaccggattt

SEQ ID NO: 169334 - DNA, 17 bp, Arabidopsis thaliana
ttttcttgctagttcca

SEQ ID NO: 169335 - DNA, 17 bp, Arabidopsis thaliana
ttttcttgggattcgcg

SEQ ID NO: 169336 - DNA, 17 bp, Arabidopsis thaliana
ttttcttgtgagactca

SEQ ID NO: 169337 - DNA, 17 bp, Arabidopsis thaliana
ttttcttgtgcgatgat

SEQ ID NO: 169338 - DNA, 17 bp, Arabidopsis thaliana
ttttcttgtgggagcct

SEQ ID NO: 169339 - DNA, 17 bp, Arabidopsis thaliana
ttttcttgtttccgctc

SEQ ID NO: 169340 - DNA, 17 bp, Arabidopsis thaliana
ttttctttacaaaccac

SEQ ID NO: 169341 - DNA, 17 bp, Arabidopsis thaliana
ttttctttagactttgc

SEQ ID NO: 169342 - DNA, 17 bp, Arabidopsis thaliana
ttttctttcagtttgca

SEQ ID NO: 169343 - DNA, 17 bp, Arabidopsis thaliana
ttttctttccgactaaa

SEQ ID NO: 169344 - DNA, 17 bp, Arabidopsis thaliana
ttttctttgatggcggt

SEQ ID NO: 169345 - DNA, 17 bp, Arabidopsis thaliana
ttttctttggtatgccg

SEQ ID NO: 169346 - DNA, 17 bp, Arabidopsis thaliana
ttttctttggtgtaact

SEQ ID NO: 169347 - DNA, 17 bp, Arabidopsis thaliana
ttttctttgtgtggtag

SEQ ID NO: 169348 - DNA, 17 bp, Arabidopsis thaliana
ttttctttgttttcgct

SEQ ID NO: 169349 - DNA, 17 bp, Arabidopsis thaliana
ttttcttttgatcattc

SEQ ID NO: 169350 - DNA, 17 bp, Arabidopsis thaliana
ttttcttttgtgagtga

SEQ ID NO: 169351 - DNA, 17 bp, Arabidopsis thaliana
ttttcttttttgaccct

SEQ ID NO: 169352 - DNA, 17 bp, Arabidopsis thaliana
ttttgaaaaaggctcga

SEQ ID NO: 169353 - DNA, 17 bp, Arabidopsis thaliana
ttttgaaaacgggcgat

SEQ ID NO: 169354 - DNA, 17 bp, Arabidopsis thaliana
ttttgaaactcggatgc

SEQ ID NO: 169355 - DNA, 17 bp, Arabidopsis thaliana
ttttgaaagttactaac

SEQ ID NO: 169356 - DNA, 17 bp, Arabidopsis thaliana
ttttgaaatctggcgat

SEQ ID NO: 169357 - DNA, 17 bp, Arabidopsis thaliana
ttttgaaattaccgaac

SEQ ID NO: 169358 - DNA, 17 bp, Arabidopsis thaliana
ttttgaaattcaggagg

SEQ ID NO: 169359 - DNA, 17 bp, Arabidopsis thaliana
ttttgaaattccacctg

SEQ ID NO: 169360 - DNA, 17 bp, Arabidopsis thaliana
ttttgaacacggcctat

SEQ ID NO: 169361 - DNA, 17 bp, Arabidopsis thaliana
ttttgaaccgcaccgca

SEQ ID NO: 169362 - DNA, 17 bp, Arabidopsis thaliana
ttttgaaccttgggatg

SEQ ID NO: 169363 - DNA, 17 bp, Arabidopsis thaliana
ttttgaagtttagaccc

SEQ ID NO: 169364 - DNA, 17 bp, Arabidopsis thaliana
ttttgaatccacgctac

SEQ ID NO: 169365 - DNA, 17 bp, Arabidopsis thaliana
ttttgaatctgcttttg

SEQ ID NO: 169366 - DNA, 17 bp, Arabidopsis thaliana
ttttgaatgaatccgag

SEQ ID NO: 169367 - DNA, 17 bp, Arabidopsis thaliana
ttttgaatggttacagc

SEQ ID NO: 169368 - DNA, 17 bp, Arabidopsis thaliana
ttttgaattttgtaatg

SEQ ID NO: 169369 - DNA, 17 bp, Arabidopsis thaliana
ttttgacaaaacaactg

SEQ ID NO: 169370 - DNA, 17 bp, Arabidopsis thaliana
ttttgacaacatgaaac

SEQ ID NO: 169371 - DNA, 17 bp, Arabidopsis thaliana
ttttgacaatcagttcc

SEQ ID NO: 169372 - DNA, 17 bp, Arabidopsis thaliana
ttttgacacccctagct

SEQ ID NO: 169373 - DNA, 17 bp, Arabidopsis thaliana
ttttgacactcgggatt

SEQ ID NO: 169374 - DNA, 17 bp, Arabidopsis thaliana
ttttgacactgttgcgg

SEQ ID NO: 169375 - DNA, 17 bp, Arabidopsis thaliana
ttttgacactgttgctg

SEQ ID NO: 169376 - DNA, 17 bp, Arabidopsis thaliana
ttttgacagaatgatct

SEQ ID NO: 169377 - DNA, 17 bp, Arabidopsis thaliana
ttttgacagtaatgtga

SEQ ID NO: 169378 - DNA, 17 bp, Arabidopsis thaliana
ttttgacattgtgggct

SEQ ID NO: 169379 - DNA, 17 bp, Arabidopsis thaliana
ttttgacatttacatag

SEQ ID NO: 169380 - DNA, 17 bp, Arabidopsis thaliana
ttttgaccaattgacag

SEQ ID NO: 169381 - DNA, 17 bp, Arabidopsis thaliana
ttttgaccatgggatgt

SEQ ID NO: 169382 - DNA, 17 bp, Arabidopsis thaliana
ttttgacccaggtgacg

SEQ ID NO: 169383 - DNA, 17 bp, Arabidopsis thaliana
ttttgacccattttgac

SEQ ID NO: 169384 - DNA, 17 bp, Arabidopsis thaliana
ttttgacccattttgat

SEQ ID NO: 169385 - DNA, 17 bp, Arabidopsis thaliana
ttttgaccctgatcagt

SEQ ID NO: 169386 - DNA, 17 bp, Arabidopsis thaliana
ttttgaccttttttgag

SEQ ID NO: 169387 - DNA, 17 bp, Arabidopsis thaliana
ttttgacgattagggtt

SEQ ID NO: 169388 - DNA, 17 bp, Arabidopsis thaliana
ttttgacggaaaaatca

SEQ ID NO: 169389 - DNA, 17 bp, Arabidopsis thaliana
ttttgacgtgacagtgg

SEQ ID NO: 169390 - DNA, 17 bp, Arabidopsis thaliana
ttttgacgttcgtttgg

SEQ ID NO: 169391 - DNA, 17 bp, Arabidopsis thaliana
ttttgacgttttaggca

SEQ ID NO: 169392 - DNA, 17 bp, Arabidopsis thaliana
ttttgactaaactatct

SEQ ID NO: 169393 - DNA, 17 bp, Arabidopsis thaliana
ttttgactgcagaccta

SEQ ID NO: 169394 - DNA, 17 bp, Arabidopsis thaliana
ttttgacttcgttagga

SEQ ID NO: 169395 - DNA, 17 bp, Arabidopsis thaliana
ttttgactttgctatga

SEQ ID NO: 169396 - DNA, 17 bp, Arabidopsis thaliana
ttttgagaaatcaaagt

SEQ ID NO: 169397 - DNA, 17 bp, Arabidopsis thaliana
ttttgagaacggaccga

SEQ ID NO: 169398 - DNA, 17 bp, Arabidopsis thaliana
ttttgagaacggaccgg

SEQ ID NO: 169399 - DNA, 17 bp, Arabidopsis thaliana
ttttgagatcgggttgc

SEQ ID NO: 169400 - DNA, 17 bp, Arabidopsis thaliana
ttttgagattgagtgtg

SEQ ID NO: 169401 - DNA, 17 bp, Arabidopsis thaliana
ttttgagcagtccgatg

SEQ ID NO: 169402 - DNA, 17 bp, Arabidopsis thaliana
ttttgagccaggagact

SEQ ID NO: 169403 - DNA, 17 bp, Arabidopsis thaliana
ttttgagccagtcaacg

SEQ ID NO: 169404 - DNA, 17 bp, Arabidopsis thaliana
ttttgagccttcgatgt

SEQ ID NO: 169405 - DNA, 17 bp, Arabidopsis thaliana
ttttgagcgatcagtcc

SEQ ID NO: 169406 - DNA, 17 bp, Arabidopsis thaliana
ttttgagctatcgatca

SEQ ID NO: 169407 - DNA, 17 bp, Arabidopsis thaliana
ttttgagctctgccact

SEQ ID NO: 169408 - DNA, 17 bp, Arabidopsis thaliana
ttttgaggcaattgtca

SEQ ID NO: 169409 - DNA, 17 bp, Arabidopsis thaliana
ttttgaggcacttttca

SEQ ID NO: 169410 - DNA, 17 bp, Arabidopsis thaliana
ttttgaggcatttttca

SEQ ID NO: 169411 - DNA, 17 bp, Arabidopsis thaliana
ttttgaggtcccgccac

SEQ ID NO: 169412 - DNA, 17 bp, Arabidopsis thaliana
ttttgaggtcccgccat

SEQ ID NO: 169413 - DNA, 17 bp, Arabidopsis thaliana
ttttgagtcggggtcgg

SEQ ID NO: 169414 - DNA, 17 bp, Arabidopsis thaliana
ttttgagtgaatatgcc

SEQ ID NO: 169415 - DNA, 17 bp, Arabidopsis thaliana
ttttgagtgcggttttg

SEQ ID NO: 169416 - DNA, 17 bp, Arabidopsis thaliana
ttttgagttggtgattg

SEQ ID NO: 169417 - DNA, 17 bp, Arabidopsis thaliana
ttttgagttttcgcaga

SEQ ID NO: 169418 - DNA, 17 bp, Arabidopsis thaliana
ttttgatccttccatgt

SEQ ID NO: 169419 - DNA, 17 bp, Arabidopsis thaliana
ttttgatccttcgatgt

SEQ ID NO: 169420 - DNA, 17 bp, Arabidopsis thaliana
ttttgatcgctaagttg

SEQ ID NO: 169421 - DNA, 17 bp, Arabidopsis thaliana
ttttgatcgctgtcgct

SEQ ID NO: 169422 - DNA, 17 bp, Arabidopsis thaliana
ttttgatcggcgacgat

SEQ ID NO: 169423 - DNA, 17 bp, Arabidopsis thaliana
ttttgatcgggaagtga

SEQ ID NO: 169424 - DNA, 17 bp, Arabidopsis thaliana
ttttgatcgggaagtgc

SEQ ID NO: 169425 - DNA, 17 bp, Arabidopsis thaliana
ttttgatcgtctagatg

SEQ ID NO: 169426 - DNA, 17 bp, Arabidopsis thaliana
ttttgatctgcatgcca

SEQ ID NO: 169427 - DNA, 17 bp, Arabidopsis thaliana
ttttgatcttgtgatct

SEQ ID NO: 169428 - DNA, 17 bp, Arabidopsis thaliana
ttttgatctttcgatgt

SEQ ID NO: 169429 - DNA, 17 bp, Arabidopsis thaliana
ttttgatgacccgtcct

SEQ ID NO: 169430 - DNA, 17 bp, Arabidopsis thaliana
ttttgatgagcattgca

SEQ ID NO: 169431 - DNA, 17 bp, Arabidopsis thaliana
ttttgatgatgtaccaa

SEQ ID NO: 169432 - DNA, 17 bp, Arabidopsis thaliana
ttttgatgggtctcgtt

SEQ ID NO: 169433 - DNA, 17 bp, Arabidopsis thaliana
ttttgatgtcggtgaga

SEQ ID NO: 169434 - DNA, 17 bp, Arabidopsis thaliana
ttttgatgttcgtttgg

SEQ ID NO: 169435 - DNA, 17 bp, Arabidopsis thaliana
ttttgattcttcgatgt

SEQ ID NO: 169436 - DNA, 17 bp, Arabidopsis thaliana
ttttgattgcgcaagag

SEQ ID NO: 169437 - DNA, 17 bp, Arabidopsis thaliana
ttttgatttcatgtgtc

SEQ ID NO: 169438 - DNA, 17 bp, Arabidopsis thaliana
ttttgcaagactatcgg

SEQ ID NO: 169439 - DNA, 17 bp, Arabidopsis thaliana
ttttgcaagcactcgtt

SEQ ID NO: 169440 - DNA, 17 bp, Arabidopsis thaliana
ttttgcacatcttgctg

SEQ ID NO: 169441 - DNA, 17 bp, Arabidopsis thaliana
ttttgcaccgtcgttac

SEQ ID NO: 169442 - DNA, 17 bp, Arabidopsis thaliana
ttttgcactcgtttggt

SEQ ID NO: 169443 - DNA, 17 bp, Arabidopsis thaliana
ttttgcactgttccgat

SEQ ID NO: 169444 - DNA, 17 bp, Arabidopsis thaliana
ttttgcacttcccttcc

SEQ ID NO: 169445 - DNA, 17 bp, Arabidopsis thaliana
ttttgcagcggtgatga

SEQ ID NO: 169446 - DNA, 17 bp, Arabidopsis thaliana
ttttgcaggatgggttt

SEQ ID NO: 169447 - DNA, 17 bp, Arabidopsis thaliana
ttttgccaaaaaccgca

SEQ ID NO: 169448 - DNA, 17 bp, Arabidopsis thaliana
ttttgccaccctcaccc

SEQ ID NO: 169449 - DNA, 17 bp, Arabidopsis thaliana
ttttgccaccgaacgcg

SEQ ID NO: 169450 - DNA, 17 bp, Arabidopsis thaliana
ttttgccacttgcgctt

SEQ ID NO: 169451 - DNA, 17 bp, Arabidopsis thaliana
ttttgccatttactgtc

SEQ ID NO: 169452 - DNA, 17 bp, Arabidopsis thaliana
ttttgcccaacgtgtag

SEQ ID NO: 169453 - DNA, 17 bp, Arabidopsis thaliana
ttttgcccatttactag

SEQ ID NO: 169454 - DNA, 17 bp, Arabidopsis thaliana
ttttgcccgtcaacgtt

SEQ ID NO: 169455 - DNA, 17 bp, Arabidopsis thaliana
ttttgccctctagttgt

SEQ ID NO: 169456 - DNA, 17 bp, Arabidopsis thaliana
ttttgcccttgctgcta

SEQ ID NO: 169457 - DNA, 17 bp, Arabidopsis thaliana
ttttgccgtctttgttg

SEQ ID NO: 169458 - DNA, 17 bp, Arabidopsis thaliana
ttttgcctctgctgtcg

SEQ ID NO: 169459 - DNA, 17 bp, Arabidopsis thaliana
ttttgcctctgctttcg

SEQ ID NO: 169460 - DNA, 17 bp, Arabidopsis thaliana
ttttgcctcttgctatt

SEQ ID NO: 169461 - DNA, 17 bp, Arabidopsis thaliana
ttttgccttccgcagtt

SEQ ID NO: 169462 - DNA, 17 bp, Arabidopsis thaliana
ttttgcctttgcctttg

SEQ ID NO: 169463 - DNA, 17 bp, Arabidopsis thaliana
ttttgcctttgttctgt

SEQ ID NO: 169464 - DNA, 17 bp, Arabidopsis thaliana
ttttgcctttgttcttt

SEQ ID NO: 169465 - DNA, 17 bp, Arabidopsis thaliana
ttttgcgaatgtatgaa

SEQ ID NO: 169466 - DNA, 17 bp, Arabidopsis thaliana
ttttgcgactcaacgac

SEQ ID NO: 169467 - DNA, 17 bp, Arabidopsis thaliana
ttttgcgagggatttgc

SEQ ID NO: 169468 - DNA, 17 bp, Arabidopsis thaliana
ttttgcgatcagcggag

SEQ ID NO: 169469 - DNA, 17 bp, Arabidopsis thaliana
ttttgcgcagcattttt

SEQ ID NO: 169470 - DNA, 17 bp, Arabidopsis thaliana
ttttgcgcatttagcac

SEQ ID NO: 169471 - DNA, 17 bp, Arabidopsis thaliana
ttttgcgcctgggaaat

SEQ ID NO: 169472 - DNA, 17 bp, Arabidopsis thaliana
ttttgcggccgtcttta

SEQ ID NO: 169473 - DNA, 17 bp, Arabidopsis thaliana
ttttgcgggacgggttt

SEQ ID NO: 169474 - DNA, 17 bp, Arabidopsis thaliana
ttttgcgggctaacgtc

SEQ ID NO: 169475 - DNA, 17 bp, Arabidopsis thaliana
ttttgcgggtgctagcg

SEQ ID NO: 169476 - DNA, 17 bp, Arabidopsis thaliana
ttttgcggtgccaacat

SEQ ID NO: 169477 - DNA, 17 bp, Arabidopsis thaliana
ttttgcggttgcgagcg

SEQ ID NO: 169478 - DNA, 17 bp, Arabidopsis thaliana
ttttgcggttgcgggcg

SEQ ID NO: 169479 - DNA, 17 bp, Arabidopsis thaliana
ttttgcggtttgggcgg

SEQ ID NO: 169480 - DNA, 17 bp, Arabidopsis thaliana
ttttgcggtttgtgttt

SEQ ID NO: 169481 - DNA, 17 bp, Arabidopsis thaliana
ttttgcgtcggagttgc

SEQ ID NO: 169482 - DNA, 17 bp, Arabidopsis thaliana
ttttgcgtcggatttgc

SEQ ID NO: 169483 - DNA, 17 bp, Arabidopsis thaliana
ttttgcgtcgtacactt

SEQ ID NO: 169484 - DNA, 17 bp, Arabidopsis thaliana
ttttgcgtctctctcga

SEQ ID NO: 169485 - DNA, 17 bp, Arabidopsis thaliana
ttttgcgtctctctctc

SEQ ID NO: 169486 - DNA, 17 bp, Arabidopsis thaliana
ttttgcgtgggatatat

SEQ ID NO: 169487 - DNA, 17 bp, Arabidopsis thaliana
ttttgcgttagtttgcg

SEQ ID NO: 169488 - DNA, 17 bp, Arabidopsis thaliana
ttttgcgttagtttgtg

SEQ ID NO: 169489 - DNA, 17 bp, Arabidopsis thaliana
ttttgcgtttgagccac

SEQ ID NO: 169490 - DNA, 17 bp, Arabidopsis thaliana
ttttgcgtttggatgag

SEQ ID NO: 169491 - DNA, 17 bp, Arabidopsis thaliana
ttttgctaagcactttc

SEQ ID NO: 169492 - DNA, 17 bp, Arabidopsis thaliana
ttttgctatgtccggcg

SEQ ID NO: 169493 - DNA, 17 bp, Arabidopsis thaliana
ttttgctcaccggcgtc

SEQ ID NO: 169494 - DNA, 17 bp, Arabidopsis thaliana
ttttgctcatacggatc

SEQ ID NO: 169495 - DNA, 17 bp, Arabidopsis thaliana
ttttgctccagaatgct

SEQ ID NO: 169496 - DNA, 17 bp, Arabidopsis thaliana
ttttgctccgcactaac

SEQ ID NO: 169497 - DNA, 17 bp, Arabidopsis thaliana
ttttgctccgtcgatga

SEQ ID NO: 169498 - DNA, 17 bp, Arabidopsis thaliana
ttttgctcctttgtcgc

SEQ ID NO: 169499 - DNA, 17 bp, Arabidopsis thaliana
ttttgctcgcacataag

SEQ ID NO: 169500 - DNA, 17 bp, Arabidopsis thaliana
ttttgctctcggaaatt

SEQ ID NO: 169501 - DNA, 17 bp, Arabidopsis thaliana
ttttgctgcctcgttac

SEQ ID NO: 169502 - DNA, 17 bp, Arabidopsis thaliana
ttttgctgcggagttga

SEQ ID NO: 169503 - DNA, 17 bp, Arabidopsis thaliana
ttttgctgctagcttcc

SEQ ID NO: 169504 - DNA, 17 bp, Arabidopsis thaliana
ttttgctggacgggttt

SEQ ID NO: 169505 - DNA, 17 bp, Arabidopsis thaliana
ttttgctgggccgaaac

SEQ ID NO: 169506 - DNA, 17 bp, Arabidopsis thaliana
ttttgctgtcgaccaaa

SEQ ID NO: 169507 - DNA, 17 bp, Arabidopsis thaliana
ttttgctgttgatgtcg

SEQ ID NO: 169508 - DNA, 17 bp, Arabidopsis thaliana
ttttgcttacagtttgt

SEQ ID NO: 169509 - DNA, 17 bp, Arabidopsis thaliana
ttttgcttcagcttctt

SEQ ID NO: 169510 - DNA, 17 bp, Arabidopsis thaliana
ttttgcttctgcaacct

SEQ ID NO: 169511 - DNA, 17 bp, Arabidopsis thaliana
ttttgcttgcttctggt

SEQ ID NO: 169512 - DNA, 17 bp, Arabidopsis thaliana
ttttgctttgtgcgacc

SEQ ID NO: 169513 - DNA, 17 bp, Arabidopsis thaliana
ttttgctttgtttctag

SEQ ID NO: 169514 - DNA, 17 bp, Arabidopsis thaliana
ttttgcttttcgccatt

SEQ ID NO: 169515 - DNA, 17 bp, Arabidopsis thaliana
ttttggaaagtcggcgt

SEQ ID NO: 169516 - DNA, 17 bp, Arabidopsis thaliana
ttttggaaccggtgtct

SEQ ID NO: 169517 - DNA, 17 bp, Arabidopsis thaliana
ttttggaactgccgggg

SEQ ID NO: 169518 - DNA, 17 bp, Arabidopsis thaliana
ttttggaactgtcggag

SEQ ID NO: 169519 - DNA, 17 bp, Arabidopsis thaliana
ttttggaagcctcggta

SEQ ID NO: 169520 - DNA, 17 bp, Arabidopsis thaliana
ttttggaaggactacaa

SEQ ID NO: 169521 - DNA, 17 bp, Arabidopsis thaliana
ttttggaaggatgactg

SEQ ID NO: 169522 - DNA, 17 bp, Arabidopsis thaliana
ttttggaagtctaggcg

SEQ ID NO: 169523 - DNA, 17 bp, Arabidopsis thaliana
ttttggacagtggtgta

SEQ ID NO: 169524 - DNA, 17 bp, Arabidopsis thaliana
ttttggaccaccaattc

SEQ ID NO: 169525 - DNA, 17 bp, Arabidopsis thaliana
ttttggaccagaacgga

SEQ ID NO: 169526 - DNA, 17 bp, Arabidopsis thaliana
ttttggaccatctcttg

SEQ ID NO: 169527 - DNA, 17 bp, Arabidopsis thaliana
ttttggaccatgattcc

SEQ ID NO: 169528 - DNA, 17 bp, Arabidopsis thaliana
ttttggacgcctgataa

SEQ ID NO: 169529 - DNA, 17 bp, Arabidopsis thaliana
ttttggactctttgccc

SEQ ID NO: 169530 - DNA, 17 bp, Arabidopsis thaliana
ttttggactgaaacccg

SEQ ID NO: 169531 - DNA, 17 bp, Arabidopsis thaliana
ttttggactgaagctcg

SEQ ID NO: 169532 - DNA, 17 bp, Arabidopsis thaliana
ttttggagaacaaaact

SEQ ID NO: 169533 - DNA, 17 bp, Arabidopsis thaliana
ttttggagaatcctcaa

SEQ ID NO: 169534 - DNA, 17 bp, Arabidopsis thaliana
ttttggagaattacggg

SEQ ID NO: 169535 - DNA, 17 bp, Arabidopsis thaliana
ttttggagacccgcttt

SEQ ID NO: 169536 - DNA, 17 bp, Arabidopsis thaliana
ttttggagctcctctct

SEQ ID NO: 169537 - DNA, 17 bp, Arabidopsis thaliana
ttttggagcttccaaaa

SEQ ID NO: 169538 - DNA, 17 bp, Arabidopsis thaliana
ttttggaggcgcgtcgg

SEQ ID NO: 169539 - DNA, 17 bp, Arabidopsis thaliana
ttttggatagcaggtaa

SEQ ID NO: 169540 - DNA, 17 bp, Arabidopsis thaliana
ttttggatcaggttcgg

SEQ ID NO: 169541 - DNA, 17 bp, Arabidopsis thaliana
ttttggatccataagcc

SEQ ID NO: 169542 - DNA, 17 bp, Arabidopsis thaliana
ttttggatggtccatct

SEQ ID NO: 169543 - DNA, 17 bp, Arabidopsis thaliana
ttttggatgtttgtggc

SEQ ID NO: 169544 - DNA, 17 bp, Arabidopsis thaliana
ttttggcaacgcatttt

SEQ ID NO: 169545 - DNA, 17 bp, Arabidopsis thaliana
ttttggcaactcggaat

SEQ ID NO: 169546 - DNA, 17 bp, Arabidopsis thaliana
ttttggcagatctgtgc

SEQ ID NO: 169547 - DNA, 17 bp, Arabidopsis thaliana
ttttggccaggcaaact

SEQ ID NO: 169548 - DNA, 17 bp, Arabidopsis thaliana
ttttggccgagaaacct

SEQ ID NO: 169549 - DNA, 17 bp, Arabidopsis thaliana
ttttggccgagacacct

SEQ ID NO: 169550 - DNA, 17 bp, Arabidopsis thaliana
ttttggccggaaaatga

SEQ ID NO: 169551 - DNA, 17 bp, Arabidopsis thaliana
ttttggccgggtcaacg

SEQ ID NO: 169552 - DNA, 17 bp, Arabidopsis thaliana
ttttggcctacatcaat

SEQ ID NO: 169553 - DNA, 17 bp, Arabidopsis thaliana
ttttggcctgatcaacg

SEQ ID NO: 169554 - DNA, 17 bp, Arabidopsis thaliana
ttttggcctggccaacg

SEQ ID NO: 169555 - DNA, 17 bp, Arabidopsis thaliana
ttttggcctggtcaaca

SEQ ID NO: 169556 - DNA, 17 bp, Arabidopsis thaliana
ttttggcctggtcaacg

SEQ ID NO: 169557 - DNA, 17 bp, Arabidopsis thaliana
ttttggccttgtcaacg

SEQ ID NO: 169558 - DNA, 17 bp, Arabidopsis thaliana
ttttggcgacgcgtgta

SEQ ID NO: 169559 - DNA, 17 bp, Arabidopsis thaliana
ttttggcgcaaagttca

SEQ ID NO: 169560 - DNA, 17 bp, Arabidopsis thaliana
ttttggcggaaaaatta

SEQ ID NO: 169561 - DNA, 17 bp, Arabidopsis thaliana
ttttggcggaaaaattg

SEQ ID NO: 169562 - DNA, 17 bp, Arabidopsis thaliana
ttttggcggacaaattt

SEQ ID NO: 169563 - DNA, 17 bp, Arabidopsis thaliana
ttttggcgggaaaacgt

SEQ ID NO: 169564 - DNA, 17 bp, Arabidopsis thaliana
ttttggcgggaaaatca

SEQ ID NO: 169565 - DNA, 17 bp, Arabidopsis thaliana
ttttggcgggaaaatgt

SEQ ID NO: 169566 - DNA, 17 bp, Arabidopsis thaliana
ttttggcgggaaaatta

SEQ ID NO: 169567 - DNA, 17 bp, Arabidopsis thaliana
ttttggcgggaaacttt

SEQ ID NO: 169568 - DNA, 17 bp, Arabidopsis thaliana
ttttggcgtcttcggca

SEQ ID NO: 169569 - DNA, 17 bp, Arabidopsis thaliana
ttttggcgtgatcatta

SEQ ID NO: 169570 - DNA, 17 bp, Arabidopsis thaliana
ttttggctaatctcaac

SEQ ID NO: 169571 - DNA, 17 bp, Arabidopsis thaliana
ttttggctcatgggctt

SEQ ID NO: 169572 - DNA, 17 bp, Arabidopsis thaliana
ttttggctcctgcttcg

SEQ ID NO: 169573 - DNA, 17 bp, Arabidopsis thaliana
ttttggctcggattcgg

SEQ ID NO: 169574 - DNA, 17 bp, Arabidopsis thaliana
ttttggctgaaatcacg

SEQ ID NO: 169575 - DNA, 17 bp, Arabidopsis thaliana
ttttggctgccaagtac

SEQ ID NO: 169576 - DNA, 17 bp, Arabidopsis thaliana
ttttgggaagattacgg

SEQ ID NO: 169577 - DNA, 17 bp, Arabidopsis thaliana
ttttgggaattgtgacc

SEQ ID NO: 169578 - DNA, 17 bp, Arabidopsis thaliana
ttttgggaccaaaatta

SEQ ID NO: 169579 - DNA, 17 bp, Arabidopsis thaliana
ttttgggattccaaagg

SEQ ID NO: 169580 - DNA, 17 bp, Arabidopsis thaliana
ttttgggcacgtcgtta

SEQ ID NO: 169581 - DNA, 17 bp, Arabidopsis thaliana
ttttgggccaaaaagca

SEQ ID NO: 169582 - DNA, 17 bp, Arabidopsis thaliana
ttttgggccaaaatccg

SEQ ID NO: 169583 - DNA, 17 bp, Arabidopsis thaliana
ttttgggcccttaaatt

SEQ ID NO: 169584 - DNA, 17 bp, Arabidopsis thaliana
ttttgggcctgaaccgt

SEQ ID NO: 169585 - DNA, 17 bp, Arabidopsis thaliana
ttttgggcctgaacttt

SEQ ID NO: 169586 - DNA, 17 bp, Arabidopsis thaliana
ttttgggcgagaaaatt

SEQ ID NO: 169587 - DNA, 17 bp, Arabidopsis thaliana
ttttgggcggatcaacg

SEQ ID NO: 169588 - DNA, 17 bp, Arabidopsis thaliana
ttttgggtaacgggtaa

SEQ ID NO: 169589 - DNA, 17 bp, Arabidopsis thaliana
ttttgggtcaccgggtc

SEQ ID NO: 169590 - DNA, 17 bp, Arabidopsis thaliana
ttttgggtccgtaatat

SEQ ID NO: 169591 - DNA, 17 bp, Arabidopsis thaliana
ttttgggtccgtcatat

SEQ ID NO: 169592 - DNA, 17 bp, Arabidopsis thaliana
ttttgggtcgcaggtag

SEQ ID NO: 169593 - DNA, 17 bp, Arabidopsis thaliana
ttttgggtctcaggtgt

SEQ ID NO: 169594 - DNA, 17 bp, Arabidopsis thaliana
ttttgggtctgtcatat

SEQ ID NO: 169595 - DNA, 17 bp, Arabidopsis thaliana
ttttgggtctttggcgg

SEQ ID NO: 169596 - DNA, 17 bp, Arabidopsis thaliana
ttttgggttcatgtcac

SEQ ID NO: 169597 - DNA, 17 bp, Arabidopsis thaliana
ttttggtaacgaccgtt

SEQ ID NO: 169598 - DNA, 17 bp, Arabidopsis thaliana
ttttggtatgcgtttgt

SEQ ID NO: 169599 - DNA, 17 bp, Arabidopsis thaliana
ttttggtcaccattcac

SEQ ID NO: 169600 - DNA, 17 bp, Arabidopsis thaliana
ttttggtcccaaggccc

SEQ ID NO: 169601 - DNA, 17 bp, Arabidopsis thaliana
ttttggtcccaaggcgc

SEQ ID NO: 169602 - DNA, 17 bp, Arabidopsis thaliana
ttttggtcccaaggctc

SEQ ID NO: 169603 - DNA, 17 bp, Arabidopsis thaliana
ttttggtcctcatactc

SEQ ID NO: 169604 - DNA, 17 bp, Arabidopsis thaliana
ttttggtcggccaagtt

SEQ ID NO: 169605 - DNA, 17 bp, Arabidopsis thaliana
ttttggtcgttgtcgct

SEQ ID NO: 169606 - DNA, 17 bp, Arabidopsis thaliana
ttttggtggataccgag

SEQ ID NO: 169607 - DNA, 17 bp, Arabidopsis thaliana
ttttggtggcaggttta

SEQ ID NO: 169608 - DNA, 17 bp, Arabidopsis thaliana
ttttggttaccgttcac

SEQ ID NO: 169609 - DNA, 17 bp, Arabidopsis thaliana
ttttggttatgacggca

SEQ ID NO: 169610 - DNA, 17 bp, Arabidopsis thaliana
ttttggttcaacttgca

SEQ ID NO: 169611 - DNA, 17 bp, Arabidopsis thaliana
ttttggttcatactgac

SEQ ID NO: 169612 - DNA, 17 bp, Arabidopsis thaliana
ttttggttcggattcga

SEQ ID NO: 169613 - DNA, 17 bp, Arabidopsis thaliana
ttttggttctcacactg

SEQ ID NO: 169614 - DNA, 17 bp, Arabidopsis thaliana
ttttggttctgggccga

SEQ ID NO: 169615 - DNA, 17 bp, Arabidopsis thaliana
ttttggttgcgtcttga

SEQ ID NO: 169616 - DNA, 17 bp, Arabidopsis thaliana
ttttggttgctcttgga

SEQ ID NO: 169617 - DNA, 17 bp, Arabidopsis thaliana
ttttggtttcggatgac

SEQ ID NO: 169618 - DNA, 17 bp, Arabidopsis thaliana
ttttggtttgacccgat

SEQ ID NO: 169619 - DNA, 17 bp, Arabidopsis thaliana
ttttgtaaaagtgtccg

SEQ ID NO: 169620 - DNA, 17 bp, Arabidopsis thaliana
ttttgtaaactgaaggt

SEQ ID NO: 169621 - DNA, 17 bp, Arabidopsis thaliana
ttttgtaaacttacccc

SEQ ID NO: 169622 - DNA, 17 bp, Arabidopsis thaliana
ttttgtacaacacaggc

SEQ ID NO: 169623 - DNA, 17 bp, Arabidopsis thaliana
ttttgtacttgagagtt

SEQ ID NO: 169624 - DNA, 17 bp, Arabidopsis thaliana
ttttgtactttcggttt

SEQ ID NO: 169625 - DNA, 17 bp, Arabidopsis thaliana
ttttgtagacgtacacg

SEQ ID NO: 169626 - DNA, 17 bp, Arabidopsis thaliana
ttttgtaggctccgtga

SEQ ID NO: 169627 - DNA, 17 bp, Arabidopsis thaliana
ttttgtaggtggctttg

SEQ ID NO: 169628 - DNA, 17 bp, Arabidopsis thaliana
ttttgtagtttaggatt

SEQ ID NO: 169629 - DNA, 17 bp, Arabidopsis thaliana
ttttgtagtttagtggt

SEQ ID NO: 169630 - DNA, 17 bp, Arabidopsis thaliana
ttttgtatcggtgcgat

SEQ ID NO: 169631 - DNA, 17 bp, Arabidopsis thaliana
ttttgtatttcaacgga

SEQ ID NO: 169632 - DNA, 17 bp, Arabidopsis thaliana
ttttgtatttcaccgga

SEQ ID NO: 169633 - DNA, 17 bp, Arabidopsis thaliana
ttttgtcaccgatgaag

SEQ ID NO: 169634 - DNA, 17 bp, Arabidopsis thaliana
ttttgtcagttgcagaa

SEQ ID NO: 169635 - DNA, 17 bp, Arabidopsis thaliana
ttttgtcagttgcataa

SEQ ID NO: 169636 - DNA, 17 bp, Arabidopsis thaliana
ttttgtcatttactgtc

SEQ ID NO: 169637 - DNA, 17 bp, Arabidopsis thaliana
ttttgtcccaagcgtca

SEQ ID NO: 169638 - DNA, 17 bp, Arabidopsis thaliana
ttttgtccctgtctact

SEQ ID NO: 169639 - DNA, 17 bp, Arabidopsis thaliana
ttttgtcctcgttcata

SEQ ID NO: 169640 - DNA, 17 bp, Arabidopsis thaliana
ttttgtccttaggctca

SEQ ID NO: 169641 - DNA, 17 bp, Arabidopsis thaliana
ttttgtccttgtcttca

SEQ ID NO: 169642 - DNA, 17 bp, Arabidopsis thaliana
ttttgtcgaacaaagag

SEQ ID NO: 169643 - DNA, 17 bp, Arabidopsis thaliana
ttttgtcgaactaacat

SEQ ID NO: 169644 - DNA, 17 bp, Arabidopsis thaliana
ttttgtcgacccaaaat

SEQ ID NO: 169645 - DNA, 17 bp, Arabidopsis thaliana
ttttgtcgaccccaaat

SEQ ID NO: 169646 - DNA, 17 bp, Arabidopsis thaliana
ttttgtcgttagccaag

SEQ ID NO: 169647 - DNA, 17 bp, Arabidopsis thaliana
ttttgtctaatttggcc

SEQ ID NO: 169648 - DNA, 17 bp, Arabidopsis thaliana
ttttgtctacgtcgccg

SEQ ID NO: 169649 - DNA, 17 bp, Arabidopsis thaliana
ttttgtctatattttac

SEQ ID NO: 169650 - DNA, 17 bp, Arabidopsis thaliana
ttttgtctcctgatgac

SEQ ID NO: 169651 - DNA, 17 bp, Arabidopsis thaliana
ttttgtctcctttggct

SEQ ID NO: 169652 - DNA, 17 bp, Arabidopsis thaliana
ttttgtctgcggtttag

SEQ ID NO: 169653 - DNA, 17 bp, Arabidopsis thaliana
ttttgtctgctactcga

SEQ ID NO: 169654 - DNA, 17 bp, Arabidopsis thaliana
ttttgtctgcttggacc

SEQ ID NO: 169655 - DNA, 17 bp, Arabidopsis thaliana
ttttgtctgggcccgca

SEQ ID NO: 169656 - DNA, 17 bp, Arabidopsis thaliana
ttttgtctgtagtaggg

SEQ ID NO: 169657 - DNA, 17 bp, Arabidopsis thaliana
ttttgtctgtttggacc

SEQ ID NO: 169658 - DNA, 17 bp, Arabidopsis thaliana
ttttgtcttcggttcgt

SEQ ID NO: 169659 - DNA, 17 bp, Arabidopsis thaliana
ttttgtcttgaggcacg

SEQ ID NO: 169660 - DNA, 17 bp, Arabidopsis thaliana
ttttgtgaatggttttg

SEQ ID NO: 169661 - DNA, 17 bp, Arabidopsis thaliana
ttttgtgacttgcttca

SEQ ID NO: 169662 - DNA, 17 bp, Arabidopsis thaliana
ttttgtgagattctcag

SEQ ID NO: 169663 - DNA, 17 bp, Arabidopsis thaliana
ttttgtgatcgtggtgg

SEQ ID NO: 169664 - DNA, 17 bp, Arabidopsis thaliana
ttttgtgattccggcca

SEQ ID NO: 169665 - DNA, 17 bp, Arabidopsis thaliana
ttttgtgcaatgaggat

SEQ ID NO: 169666 - DNA, 17 bp, Arabidopsis thaliana
ttttgtgccaaattatc

SEQ ID NO: 169667 - DNA, 17 bp, Arabidopsis thaliana
ttttgtgccaagggtcg

SEQ ID NO: 169668 - DNA, 17 bp, Arabidopsis thaliana
ttttgtgccgatgttga

SEQ ID NO: 169669 - DNA, 17 bp, Arabidopsis thaliana
ttttgtgcgttctgata

SEQ ID NO: 169670 - DNA, 17 bp, Arabidopsis thaliana
ttttgtgctgcctcgtt

SEQ ID NO: 169671 - DNA, 17 bp, Arabidopsis thaliana
ttttgtggaccgaggat

SEQ ID NO: 169672 - DNA, 17 bp, Arabidopsis thaliana
ttttgtggatattcgct

SEQ ID NO: 169673 - DNA, 17 bp, Arabidopsis thaliana
ttttgtggctaatgcgc

SEQ ID NO: 169674 - DNA, 17 bp, Arabidopsis thaliana
ttttgtggtgcagggaa

SEQ ID NO: 169675 - DNA, 17 bp, Arabidopsis thaliana
ttttgtgtcgttcgctt

SEQ ID NO: 169676 - DNA, 17 bp, Arabidopsis thaliana
ttttgtgtctgaccgag

SEQ ID NO: 169677 - DNA, 17 bp, Arabidopsis thaliana
ttttgtgtgacatatgg

SEQ ID NO: 169678 - DNA, 17 bp, Arabidopsis thaliana
ttttgtgttcggcgtcc

SEQ ID NO: 169679 - DNA, 17 bp, Arabidopsis thaliana
ttttgtgttgtgctgct

SEQ ID NO: 169680 - DNA, 17 bp, Arabidopsis thaliana
ttttgtgtttaggcgga

SEQ ID NO: 169681 - DNA, 17 bp, Arabidopsis thaliana
ttttgttaacccgaatg

SEQ ID NO: 169682 - DNA, 17 bp, Arabidopsis thaliana
ttttgttacaggtttaa

SEQ ID NO: 169683 - DNA, 17 bp, Arabidopsis thaliana
ttttgttaccgtctgca

SEQ ID NO: 169684 - DNA, 17 bp, Arabidopsis thaliana
ttttgttactatttgaa

SEQ ID NO: 169685 - DNA, 17 bp, Arabidopsis thaliana
ttttgttatcatttgaa

SEQ ID NO: 169686 - DNA, 17 bp, Arabidopsis thaliana
ttttgttattgggctgc

SEQ ID NO: 169687 - DNA, 17 bp, Arabidopsis thaliana
ttttgttccactggaag

SEQ ID NO: 169688 - DNA, 17 bp, Arabidopsis thaliana
ttttgttccctacatgt

SEQ ID NO: 169689 - DNA, 17 bp, Arabidopsis thaliana
ttttgttccgctacaac

SEQ ID NO: 169690 - DNA, 17 bp, Arabidopsis thaliana
ttttgttcgtttggacc

SEQ ID NO: 169691 - DNA, 17 bp, Arabidopsis thaliana
ttttgttcgtttggttc

SEQ ID NO: 169692 - DNA, 17 bp, Arabidopsis thaliana
ttttgttgacccattaa

SEQ ID NO: 169693 - DNA, 17 bp, Arabidopsis thaliana
ttttgttgacctggcca

SEQ ID NO: 169694 - DNA, 17 bp, Arabidopsis thaliana
ttttgttgacttgctgt

SEQ ID NO: 169695 - DNA, 17 bp, Arabidopsis thaliana
ttttgttgattcggtcc

SEQ ID NO: 169696 - DNA, 17 bp, Arabidopsis thaliana
ttttgttgcgtccacct

SEQ ID NO: 169697 - DNA, 17 bp, Arabidopsis thaliana
ttttgttggactgggtt

SEQ ID NO: 169698 - DNA, 17 bp, Arabidopsis thaliana
ttttgttggtcccgccc

SEQ ID NO: 169699 - DNA, 17 bp, Arabidopsis thaliana
ttttgtttagatttggt

SEQ ID NO: 169700 - DNA, 17 bp, Arabidopsis thaliana
ttttgtttatcgctgcg

SEQ ID NO: 169701 - DNA, 17 bp, Arabidopsis thaliana
ttttgtttcaaaatggg

SEQ ID NO: 169702 - DNA, 17 bp, Arabidopsis thaliana
ttttgtttcagtctcgg

SEQ ID NO: 169703 - DNA, 17 bp, Arabidopsis thaliana
ttttgtttccaggagca

SEQ ID NO: 169704 - DNA, 17 bp, Arabidopsis thaliana
ttttgtttccgctctgc

SEQ ID NO: 169705 - DNA, 17 bp, Arabidopsis thaliana
ttttgtttccgctcttc

SEQ ID NO: 169706 - DNA, 17 bp, Arabidopsis thaliana
ttttgtttctagatccg

SEQ ID NO: 169707 - DNA, 17 bp, Arabidopsis thaliana
ttttgtttgcgggtagt

SEQ ID NO: 169708 - DNA, 17 bp, Arabidopsis thaliana
ttttgtttgcggtctaa

SEQ ID NO: 169709 - DNA, 17 bp, Arabidopsis thaliana
ttttgtttgtgaatccg

SEQ ID NO: 169710 - DNA, 17 bp, Arabidopsis thaliana
ttttgttttcggggttt

SEQ ID NO: 169711 - DNA, 17 bp, Arabidopsis thaliana
ttttgttttgtttcttg

SEQ ID NO: 169712 - DNA, 17 bp, Arabidopsis thaliana
tttttacaatgcgaacg

SEQ ID NO: 169713 - DNA, 17 bp, Arabidopsis thaliana
tttttacattcaagatc

SEQ ID NO: 169714 - DNA, 17 bp, Arabidopsis thaliana
tttttacattcgagatc

SEQ ID NO: 169715 - DNA, 17 bp, Arabidopsis thaliana
tttttaccatccgtgtt

SEQ ID NO: 169716 - DNA, 17 bp, Arabidopsis thaliana
tttttaccgaaactgac

SEQ ID NO: 169717 - DNA, 17 bp, Arabidopsis thaliana
tttttaccgttggggct

SEQ ID NO: 169718 - DNA, 17 bp, Arabidopsis thaliana
tttttacgattctggcg

SEQ ID NO: 169719 - DNA, 17 bp, Arabidopsis thaliana
tttttacggactgttca

SEQ ID NO: 169720 - DNA, 17 bp, Arabidopsis thaliana
tttttacgtttgaggca

SEQ ID NO: 169721 - DNA, 17 bp, Arabidopsis thaliana
tttttactacgactggg

SEQ ID NO: 169722 - DNA, 17 bp, Arabidopsis thaliana
tttttagattcgcccac

SEQ ID NO: 169723 - DNA, 17 bp, Arabidopsis thaliana
tttttagcccatggttg

SEQ ID NO: 169724 - DNA, 17 bp, Arabidopsis thaliana
tttttagccgccatctt

SEQ ID NO: 169725 - DNA, 17 bp, Arabidopsis thaliana
tttttagccgcggcttc

SEQ ID NO: 169726 - DNA, 17 bp, Arabidopsis thaliana
tttttagctgtcaggga

SEQ ID NO: 169727 - DNA, 17 bp, Arabidopsis thaliana
tttttagcttagccggc

SEQ ID NO: 169728 - DNA, 17 bp, Arabidopsis thaliana
tttttagtcgctggatc

SEQ ID NO: 169729 - DNA, 17 bp, Arabidopsis thaliana
tttttagtgttccgatg

SEQ ID NO: 169730 - DNA, 17 bp, Arabidopsis thaliana
tttttataactcagtgt

SEQ ID NO: 169731 - DNA, 17 bp, Arabidopsis thaliana
tttttatatctttgccc

SEQ ID NO: 169732 - DNA, 17 bp, Arabidopsis thaliana
tttttatccgacagctg

SEQ ID NO: 169733 - DNA, 17 bp, Arabidopsis thaliana
tttttatccgcatgcga

SEQ ID NO: 169734 - DNA, 17 bp, Arabidopsis thaliana
tttttatcgacgaacac

SEQ ID NO: 169735 - DNA, 17 bp, Arabidopsis thaliana
tttttatctgcagttga

SEQ ID NO: 169736 - DNA, 17 bp, Arabidopsis thaliana
tttttatctgccgttca

SEQ ID NO: 169737 - DNA, 17 bp, Arabidopsis thaliana
tttttattggaccgttt

SEQ ID NO: 169738 - DNA, 17 bp, Arabidopsis thaliana
tttttcaaaaagaagaa

SEQ ID NO: 169739 - DNA, 17 bp, Arabidopsis thaliana
tttttcaaaaagaataa

SEQ ID NO: 169740 - DNA, 17 bp, Arabidopsis thaliana
tttttcaaaactgaacc

SEQ ID NO: 169741 - DNA, 17 bp, Arabidopsis thaliana
tttttcaaacttccaat

SEQ ID NO: 169742 - DNA, 17 bp, Arabidopsis thaliana
tttttcaaaggccatca

SEQ ID NO: 169743 - DNA, 17 bp, Arabidopsis thaliana
tttttcaaatccaggat

SEQ ID NO: 169744 - DNA, 17 bp, Arabidopsis thaliana
tttttcaaatcctgtct

SEQ ID NO: 169745 - DNA, 17 bp, Arabidopsis thaliana
tttttcaacatggcaac

SEQ ID NO: 169746 - DNA, 17 bp, Arabidopsis thaliana
tttttcaacccgtaccg

SEQ ID NO: 169747 - DNA, 17 bp, Arabidopsis thaliana
tttttcacactttgcaa

SEQ ID NO: 169748 - DNA, 17 bp, Arabidopsis thaliana
tttttcacagactgttc

SEQ ID NO: 169749 - DNA, 17 bp, Arabidopsis thaliana
tttttcacatcaagatt

SEQ ID NO: 169750 - DNA, 17 bp, Arabidopsis thaliana
tttttcacgattgagtt

SEQ ID NO: 169751 - DNA, 17 bp, Arabidopsis thaliana
tttttcacgattgattt

SEQ ID NO: 169752 - DNA, 17 bp, Arabidopsis thaliana
tttttcacgccgattct

SEQ ID NO: 169753 - DNA, 17 bp, Arabidopsis thaliana
tttttcacttggatgat

SEQ ID NO: 169754 - DNA, 17 bp, Arabidopsis thaliana
tttttcagacggatcca

SEQ ID NO: 169755 - DNA, 17 bp, Arabidopsis thaliana
tttttcagacggatccg

SEQ ID NO: 169756 - DNA, 17 bp, Arabidopsis thaliana
tttttcagactgttcag

SEQ ID NO: 169757 - DNA, 17 bp, Arabidopsis thaliana
tttttcagcagttctcg

SEQ ID NO: 169758 - DNA, 17 bp, Arabidopsis thaliana
tttttcagccctttgtc

SEQ ID NO: 169759 - DNA, 17 bp, Arabidopsis thaliana
tttttcaggattcatgc

SEQ ID NO: 169760 - DNA, 17 bp, Arabidopsis thaliana
tttttcagggacgaagc

SEQ ID NO: 169761 - DNA, 17 bp, Arabidopsis thaliana
tttttcagggtgttctt

SEQ ID NO: 169762 - DNA, 17 bp, Arabidopsis thaliana
tttttcagtgcgctgca

SEQ ID NO: 169763 - DNA, 17 bp, Arabidopsis thaliana
tttttcagttgccgtag

SEQ ID NO: 169764 - DNA, 17 bp, Arabidopsis thaliana
tttttcagttttcaaca

SEQ ID NO: 169765 - DNA, 17 bp, Arabidopsis thaliana
tttttcatctctgccgc

SEQ ID NO: 169766 - DNA, 17 bp, Arabidopsis thaliana
tttttcatcttcagaaa

SEQ ID NO: 169767 - DNA, 17 bp, Arabidopsis thaliana
tttttcatgcgcttgat

SEQ ID NO: 169768 - DNA, 17 bp, Arabidopsis thaliana
tttttcattcatcgcgt

SEQ ID NO: 169769 - DNA, 17 bp, Arabidopsis thaliana
tttttcattgtcgggtc

SEQ ID NO: 169770 - DNA, 17 bp, Arabidopsis thaliana
tttttccacgcgctgtg

SEQ ID NO: 169771 - DNA, 17 bp, Arabidopsis thaliana
tttttccactgactttt

SEQ ID NO: 169772 - DNA, 17 bp, Arabidopsis thaliana
tttttccagaccgtttg

SEQ ID NO: 169773 - DNA, 17 bp, Arabidopsis thaliana
tttttccagacgctgcg

SEQ ID NO: 169774 - DNA, 17 bp, Arabidopsis thaliana
tttttccagattattgc

SEQ ID NO: 169775 - DNA, 17 bp, Arabidopsis thaliana
tttttccagattgcggt

SEQ ID NO: 169776 - DNA, 17 bp, Arabidopsis thaliana
tttttccatcggtgctc

SEQ ID NO: 169777 - DNA, 17 bp, Arabidopsis thaliana
tttttccatctgtggtg

SEQ ID NO: 169778 - DNA, 17 bp, Arabidopsis thaliana
tttttccattgacgttt

SEQ ID NO: 169779 - DNA, 17 bp, Arabidopsis thaliana
tttttccattgactttt

SEQ ID NO: 169780 - DNA, 17 bp, Arabidopsis thaliana
tttttcccactccgccc

SEQ ID NO: 169781 - DNA, 17 bp, Arabidopsis thaliana
tttttcccctattggac

SEQ ID NO: 169782 - DNA, 17 bp, Arabidopsis thaliana
tttttcccgccaaaaaa

SEQ ID NO: 169783 - DNA, 17 bp, Arabidopsis thaliana
tttttcccgccaaaaac

SEQ ID NO: 169784 - DNA, 17 bp, Arabidopsis thaliana
tttttcccgccaaaatt

SEQ ID NO: 169785 - DNA, 17 bp, Arabidopsis thaliana
tttttcccgttttcgcg

SEQ ID NO: 169786 - DNA, 17 bp, Arabidopsis thaliana
tttttccctcttcagtc

SEQ ID NO: 169787 - DNA, 17 bp, Arabidopsis thaliana
tttttccctgctaaggc

SEQ ID NO: 169788 - DNA, 17 bp, Arabidopsis thaliana
tttttcccttgcaaatt

SEQ ID NO: 169789 - DNA, 17 bp, Arabidopsis thaliana
tttttccgaagaaaccg

SEQ ID NO: 169790 - DNA, 17 bp, Arabidopsis thaliana
tttttccgaagcgttat

SEQ ID NO: 169791 - DNA, 17 bp, Arabidopsis thaliana
tttttccgaatcagtat

SEQ ID NO: 169792 - DNA, 17 bp, Arabidopsis thaliana
tttttccgactacctct

SEQ ID NO: 169793 - DNA, 17 bp, Arabidopsis thaliana
tttttccgacttcgccg

SEQ ID NO: 169794 - DNA, 17 bp, Arabidopsis thaliana
tttttccgccggctatg

SEQ ID NO: 169795 - DNA, 17 bp, Arabidopsis thaliana
tttttccgccttgctgc

SEQ ID NO: 169796 - DNA, 17 bp, Arabidopsis thaliana
tttttccggatatccgc

SEQ ID NO: 169797 - DNA, 17 bp, Arabidopsis thaliana
tttttccggatatctgc

SEQ ID NO: 169798 - DNA, 17 bp, Arabidopsis thaliana
tttttccggcaggttat

SEQ ID NO: 169799 - DNA, 17 bp, Arabidopsis thaliana
tttttccgtagatatcc

SEQ ID NO: 169800 - DNA, 17 bp, Arabidopsis thaliana
tttttccgtcgtctctt

SEQ ID NO: 169801 - DNA, 17 bp, Arabidopsis thaliana
tttttccgtggttggtg

SEQ ID NO: 169802 - DNA, 17 bp, Arabidopsis thaliana
tttttcctaatcgatga

SEQ ID NO: 169803 - DNA, 17 bp, Arabidopsis thaliana
tttttcctactccgccc

SEQ ID NO: 169804 - DNA, 17 bp, Arabidopsis thaliana
tttttcctattccgccc

SEQ ID NO: 169805 - DNA, 17 bp, Arabidopsis thaliana
tttttcctccaaaacta

SEQ ID NO: 169806 - DNA, 17 bp, Arabidopsis thaliana
tttttcctggaattttg

SEQ ID NO: 169807 - DNA, 17 bp, Arabidopsis thaliana
tttttcctgtccagttt

SEQ ID NO: 169808 - DNA, 17 bp, Arabidopsis thaliana
tttttccttgcggcgct

SEQ ID NO: 169809 - DNA, 17 bp, Arabidopsis thaliana
tttttcctttgggtctc

SEQ ID NO: 169810 - DNA, 17 bp, Arabidopsis thaliana
tttttcgaaaatttttg

SEQ ID NO: 169811 - DNA, 17 bp, Arabidopsis thaliana
tttttcgactgagaaag

SEQ ID NO: 169812 - DNA, 17 bp, Arabidopsis thaliana
tttttcgactgctcatt

SEQ ID NO: 169813 - DNA, 17 bp, Arabidopsis thaliana
tttttcgagagtcgggt

SEQ ID NO: 169814 - DNA, 17 bp, Arabidopsis thaliana
tttttcgagcacatgac

SEQ ID NO: 169815 - DNA, 17 bp, Arabidopsis thaliana
tttttcgataaatctag

SEQ ID NO: 169816 - DNA, 17 bp, Arabidopsis thaliana
tttttcgatgtctacca

SEQ ID NO: 169817 - DNA, 17 bp, Arabidopsis thaliana
tttttcgatgtgggacc

SEQ ID NO: 169818 - DNA, 17 bp, Arabidopsis thaliana
tttttcgccaggtttca

SEQ ID NO: 169819 - DNA, 17 bp, Arabidopsis thaliana
tttttcgccattaagtc

SEQ ID NO: 169820 - DNA, 17 bp, Arabidopsis thaliana
tttttcgcctattggac

SEQ ID NO: 169821 - DNA, 17 bp, Arabidopsis thaliana
tttttcgcggttcctcc

SEQ ID NO: 169822 - DNA, 17 bp, Arabidopsis thaliana
tttttcgcgtgtgcttt

SEQ ID NO: 169823 - DNA, 17 bp, Arabidopsis thaliana
tttttcgctggccttgt

SEQ ID NO: 169824 - DNA, 17 bp, Arabidopsis thaliana
tttttcgcttagggtcg

SEQ ID NO: 169825 - DNA, 17 bp, Arabidopsis thaliana
tttttcggacattttcg

SEQ ID NO: 169826 - DNA, 17 bp, Arabidopsis thaliana
tttttcggaccaaaccg

SEQ ID NO: 169827 - DNA, 17 bp, Arabidopsis thaliana
tttttcggaccaagaga

SEQ ID NO: 169828 - DNA, 17 bp, Arabidopsis thaliana
tttttcggaccattgtc

SEQ ID NO: 169829 - DNA, 17 bp, Arabidopsis thaliana
tttttcggacggttcgg

SEQ ID NO: 169830 - DNA, 17 bp, Arabidopsis thaliana
tttttcggcgacttttt

SEQ ID NO: 169831 - DNA, 17 bp, Arabidopsis thaliana
tttttcggcggtggcga

SEQ ID NO: 169832 - DNA, 17 bp, Arabidopsis thaliana
tttttcgggagaagggg

SEQ ID NO: 169833 - DNA, 17 bp, Arabidopsis thaliana
tttttcgggcattttcg

SEQ ID NO: 169834 - DNA, 17 bp, Arabidopsis thaliana
tttttcgggccttttcg

SEQ ID NO: 169835 - DNA, 17 bp, Arabidopsis thaliana
tttttcgggctttttcg

SEQ ID NO: 169836 - DNA, 17 bp, Arabidopsis thaliana
tttttcggggacatcta

SEQ ID NO: 169837 - DNA, 17 bp, Arabidopsis thaliana
tttttcgggtcggttcc

SEQ ID NO: 169838 - DNA, 17 bp, Arabidopsis thaliana
tttttcgggttcggatt

SEQ ID NO: 169839 - DNA, 17 bp, Arabidopsis thaliana
tttttcggtttgtctgg

SEQ ID NO: 169840 - DNA, 17 bp, Arabidopsis thaliana
tttttcgtcactgagcc

SEQ ID NO: 169841 - DNA, 17 bp, Arabidopsis thaliana
tttttcgtctcataacc

SEQ ID NO: 169842 - DNA, 17 bp, Arabidopsis thaliana
tttttcgtctgttcgac

SEQ ID NO: 169843 - DNA, 17 bp, Arabidopsis thaliana
tttttcgtgccaaatta

SEQ ID NO: 169844 - DNA, 17 bp, Arabidopsis thaliana
tttttcgtgccaaattg

SEQ ID NO: 169845 - DNA, 17 bp, Arabidopsis thaliana
tttttcgtgccaagtta

SEQ ID NO: 169846 - DNA, 17 bp, Arabidopsis thaliana
tttttcgtgttgtcgca

SEQ ID NO: 169847 - DNA, 17 bp, Arabidopsis thaliana
tttttcgttccctgtat

SEQ ID NO: 169848 - DNA, 17 bp, Arabidopsis thaliana
tttttcgttggaccgtt

SEQ ID NO: 169849 - DNA, 17 bp, Arabidopsis thaliana
tttttctacgcaagcgg

SEQ ID NO: 169850 - DNA, 17 bp, Arabidopsis thaliana
tttttctactatcctgg

SEQ ID NO: 169851 - DNA, 17 bp, Arabidopsis thaliana
tttttctatgcggcgca

SEQ ID NO: 169852 - DNA, 17 bp, Arabidopsis thaliana
tttttctcccacacttt

SEQ ID NO: 169853 - DNA, 17 bp, Arabidopsis thaliana
tttttctcgtccttctc

SEQ ID NO: 169854 - DNA, 17 bp, Arabidopsis thaliana
tttttctctcccaggcc

SEQ ID NO: 169855 - DNA, 17 bp, Arabidopsis thaliana
tttttctctcgaagaaa

SEQ ID NO: 169856 - DNA, 17 bp, Arabidopsis thaliana
tttttctctcgatcgct

SEQ ID NO: 169857 - DNA, 17 bp, Arabidopsis thaliana
tttttctctctgggcga

SEQ ID NO: 169858 - DNA, 17 bp, Arabidopsis thaliana
tttttctcttcatttgg

SEQ ID NO: 169859 - DNA, 17 bp, Arabidopsis thaliana
tttttctcttcattttt

SEQ ID NO: 169860 - DNA, 17 bp, Arabidopsis thaliana
tttttctgatggtatgc

SEQ ID NO: 169861 - DNA, 17 bp, Arabidopsis thaliana
tttttctgatgtctgga

SEQ ID NO: 169862 - DNA, 17 bp, Arabidopsis thaliana
tttttctgcactttgtc

SEQ ID NO: 169863 - DNA, 17 bp, Arabidopsis thaliana
tttttctgcatgctaaa

SEQ ID NO: 169864 - DNA, 17 bp, Arabidopsis thaliana
tttttctgctcaagacg

SEQ ID NO: 169865 - DNA, 17 bp, Arabidopsis thaliana
tttttctgctgtgattg

SEQ ID NO: 169866 - DNA, 17 bp, Arabidopsis thaliana
tttttctggatatccgc

SEQ ID NO: 169867 - DNA, 17 bp, Arabidopsis thaliana
tttttctgtatctcaag

SEQ ID NO: 169868 - DNA, 17 bp, Arabidopsis thaliana
tttttctgtcggacgta

SEQ ID NO: 169869 - DNA, 17 bp, Arabidopsis thaliana
tttttcttctggtagga

SEQ ID NO: 169870 - DNA, 17 bp, Arabidopsis thaliana
tttttctttttttggcc

SEQ ID NO: 169871 - DNA, 17 bp, Arabidopsis thaliana
tttttgaaaactttttt

SEQ ID NO: 169872 - DNA, 17 bp, Arabidopsis thaliana
tttttgaacaaatttag

SEQ ID NO: 169873 - DNA, 17 bp, Arabidopsis thaliana
tttttgaacattgtgtc

SEQ ID NO: 169874 - DNA, 17 bp, Arabidopsis thaliana
tttttgaactcgacacg

SEQ ID NO: 169875 - DNA, 17 bp, Arabidopsis thaliana
tttttgaactgttgcac

SEQ ID NO: 169876 - DNA, 17 bp, Arabidopsis thaliana
tttttgaagtttagatc

SEQ ID NO: 169877 - DNA, 17 bp, Arabidopsis thaliana
tttttgacaaagtgggc

SEQ ID NO: 169878 - DNA, 17 bp, Arabidopsis thaliana
tttttgacaccagaagg

SEQ ID NO: 169879 - DNA, 17 bp, Arabidopsis thaliana
tttttgacaggaaaatc

SEQ ID NO: 169880 - DNA, 17 bp, Arabidopsis thaliana
tttttgacatgtgcgca

SEQ ID NO: 169881 - DNA, 17 bp, Arabidopsis thaliana
tttttgaccaaatcgtg

SEQ ID NO: 169882 - DNA, 17 bp, Arabidopsis thaliana
tttttgacggagctgtt

SEQ ID NO: 169883 - DNA, 17 bp, Arabidopsis thaliana
tttttgatccttcgatg

SEQ ID NO: 169884 - DNA, 17 bp, Arabidopsis thaliana
tttttgatcgcaaagtt

SEQ ID NO: 169885 - DNA, 17 bp, Arabidopsis thaliana
tttttgatcgccacact

SEQ ID NO: 169886 - DNA, 17 bp, Arabidopsis thaliana
tttttgatgaccgtgtc

SEQ ID NO: 169887 - DNA, 17 bp, Arabidopsis thaliana
tttttgatgtagccgtg

SEQ ID NO: 169888 - DNA, 17 bp, Arabidopsis thaliana
tttttgatgtggcagcg

SEQ ID NO: 169889 - DNA, 17 bp, Arabidopsis thaliana
tttttgattccaaaaga

SEQ ID NO: 169890 - DNA, 17 bp, Arabidopsis thaliana
tttttgcacaaacaatg

SEQ ID NO: 169891 - DNA, 17 bp, Arabidopsis thaliana
tttttgcacctagagga

SEQ ID NO: 169892 - DNA, 17 bp, Arabidopsis thaliana
tttttgcagattcatgt

SEQ ID NO: 169893 - DNA, 17 bp, Arabidopsis thaliana
tttttgccatctatttt

SEQ ID NO: 169894 - DNA, 17 bp, Arabidopsis thaliana
tttttgccatttactgt

SEQ ID NO: 169895 - DNA, 17 bp, Arabidopsis thaliana
tttttgcccaaaggatc

SEQ ID NO: 169896 - DNA, 17 bp, Arabidopsis thaliana
tttttgccccatctgtt

SEQ ID NO: 169897 - DNA, 17 bp, Arabidopsis thaliana
tttttgccgctttttct

SEQ ID NO: 169898 - DNA, 17 bp, Arabidopsis thaliana
tttttgcctaactcaca

SEQ ID NO: 169899 - DNA, 17 bp, Arabidopsis thaliana
tttttgcctcttaaatt

SEQ ID NO: 169900 - DNA, 17 bp, Arabidopsis thaliana
tttttgcgaattaagtc

SEQ ID NO: 169901 - DNA, 17 bp, Arabidopsis thaliana
tttttgcgacgacagca

SEQ ID NO: 169902 - DNA, 17 bp, Arabidopsis thaliana
tttttgcgagacgggtt

SEQ ID NO: 169903 - DNA, 17 bp, Arabidopsis thaliana
tttttgcgattttagcg

SEQ ID NO: 169904 - DNA, 17 bp, Arabidopsis thaliana
tttttgcgctaaataca

SEQ ID NO: 169905 - DNA, 17 bp, Arabidopsis thaliana
tttttgcgggagtttta

SEQ ID NO: 169906 - DNA, 17 bp, Arabidopsis thaliana
tttttgcggtgaggcat

SEQ ID NO: 169907 - DNA, 17 bp, Arabidopsis thaliana
tttttgcggtgcgggag

SEQ ID NO: 169908 - DNA, 17 bp, Arabidopsis thaliana
tttttgctacgaatttg

SEQ ID NO: 169909 - DNA, 17 bp, Arabidopsis thaliana
tttttgctccagaatgc

SEQ ID NO: 169910 - DNA, 17 bp, Arabidopsis thaliana
tttttgctccccagaag

SEQ ID NO: 169911 - DNA, 17 bp, Arabidopsis thaliana
tttttgctgactcgtta

SEQ ID NO: 169912 - DNA, 17 bp, Arabidopsis thaliana
tttttgctgccattttt

SEQ ID NO: 169913 - DNA, 17 bp, Arabidopsis thaliana
tttttgctgcctcgtta

SEQ ID NO: 169914 - DNA, 17 bp, Arabidopsis thaliana
tttttgctgtagcgaca

SEQ ID NO: 169915 - DNA, 17 bp, Arabidopsis thaliana
tttttggaaagtcggcg

SEQ ID NO: 169916 - DNA, 17 bp, Arabidopsis thaliana
tttttggaaatatgctg

SEQ ID NO: 169917 - DNA, 17 bp, Arabidopsis thaliana
tttttggaacccggtta

SEQ ID NO: 169918 - DNA, 17 bp, Arabidopsis thaliana
tttttggaactgtcgga

SEQ ID NO: 169919 - DNA, 17 bp, Arabidopsis thaliana
tttttggacctccagat

SEQ ID NO: 169920 - DNA, 17 bp, Arabidopsis thaliana
tttttggactgctataa

SEQ ID NO: 169921 - DNA, 17 bp, Arabidopsis thaliana
tttttggatgttcttgg

SEQ ID NO: 169922 - DNA, 17 bp, Arabidopsis thaliana
tttttggatgttcttgt

SEQ ID NO: 169923 - DNA, 17 bp, Arabidopsis thaliana
tttttggatgtttctac

SEQ ID NO: 169924 - DNA, 17 bp, Arabidopsis thaliana
tttttggatgtttgtgg

SEQ ID NO: 169925 - DNA, 17 bp, Arabidopsis thaliana
tttttggcaagacggat

SEQ ID NO: 169926 - DNA, 17 bp, Arabidopsis thaliana
tttttggcacccctatt

SEQ ID NO: 169927 - DNA, 17 bp, Arabidopsis thaliana
tttttggcaccggtgtc

SEQ ID NO: 169928 - DNA, 17 bp, Arabidopsis thaliana
tttttggccaaaaatct

SEQ ID NO: 169929 - DNA, 17 bp, Arabidopsis thaliana
tttttggccatgtgttt

SEQ ID NO: 169930 - DNA, 17 bp, Arabidopsis thaliana
tttttggcccactacat

SEQ ID NO: 169931 - DNA, 17 bp, Arabidopsis thaliana
tttttggcccatttgca

SEQ ID NO: 169932 - DNA, 17 bp, Arabidopsis thaliana
tttttggcccatttgta

SEQ ID NO: 169933 - DNA, 17 bp, Arabidopsis thaliana
tttttggcccttaaatt

SEQ ID NO: 169934 - DNA, 17 bp, Arabidopsis thaliana
tttttggcctggtcaac

SEQ ID NO: 169935 - DNA, 17 bp, Arabidopsis thaliana
tttttggcctgttgcac

SEQ ID NO: 169936 - DNA, 17 bp, Arabidopsis thaliana
tttttggcgggaaaaac

SEQ ID NO: 169937 - DNA, 17 bp, Arabidopsis thaliana
tttttggcgggaaaatc

SEQ ID NO: 169938 - DNA, 17 bp, Arabidopsis thaliana
tttttggcgggaaaatg

SEQ ID NO: 169939 - DNA, 17 bp, Arabidopsis thaliana
tttttggctccttacgg

SEQ ID NO: 169940 - DNA, 17 bp, Arabidopsis thaliana
tttttgggcgtcttctc

SEQ ID NO: 169941 - DNA, 17 bp, Arabidopsis thaliana
tttttgggtaacgggta

SEQ ID NO: 169942 - DNA, 17 bp, Arabidopsis thaliana
tttttgggtctgcctat

SEQ ID NO: 169943 - DNA, 17 bp, Arabidopsis thaliana
tttttgggttccggggg

SEQ ID NO: 169944 - DNA, 17 bp, Arabidopsis thaliana
tttttggtccacagatt

SEQ ID NO: 169945 - DNA, 17 bp, Arabidopsis thaliana
tttttggtccacgtgga

SEQ ID NO: 169946 - DNA, 17 bp, Arabidopsis thaliana
tttttggtccagaatat

SEQ ID NO: 169947 - DNA, 17 bp, Arabidopsis thaliana
tttttggtccagaccac

SEQ ID NO: 169948 - DNA, 17 bp, Arabidopsis thaliana
tttttggtcccaacgct

SEQ ID NO: 169949 - DNA, 17 bp, Arabidopsis thaliana
tttttggtcccaaggct

SEQ ID NO: 169950 - DNA, 17 bp, Arabidopsis thaliana
tttttggtgcaatgagg

SEQ ID NO: 169951 - DNA, 17 bp, Arabidopsis thaliana
tttttggtgggcgggtt

SEQ ID NO: 169952 - DNA, 17 bp, Arabidopsis thaliana
tttttggttaggtggcg

SEQ ID NO: 169953 - DNA, 17 bp, Arabidopsis thaliana
tttttggttcgggtcca

SEQ ID NO: 169954 - DNA, 17 bp, Arabidopsis thaliana
tttttgtaccgcttcat

SEQ ID NO: 169955 - DNA, 17 bp, Arabidopsis thaliana
tttttgtcattgtgagc

SEQ ID NO: 169956 - DNA, 17 bp, Arabidopsis thaliana
tttttgtcgacccaaaa

SEQ ID NO: 169957 - DNA, 17 bp, Arabidopsis thaliana
tttttgtctgctactcg

SEQ ID NO: 169958 - DNA, 17 bp, Arabidopsis thaliana
tttttgtctgcttggac

SEQ ID NO: 169959 - DNA, 17 bp, Arabidopsis thaliana
tttttgtctttgcgcat

SEQ ID NO: 169960 - DNA, 17 bp, Arabidopsis thaliana
tttttgtgatgatgtgc

SEQ ID NO: 169961 - DNA, 17 bp, Arabidopsis thaliana
tttttgtgcccagatcg

SEQ ID NO: 169962 - DNA, 17 bp, Arabidopsis thaliana
tttttgtgcggtctgat

SEQ ID NO: 169963 - DNA, 17 bp, Arabidopsis thaliana
tttttgtggtcccacca

SEQ ID NO: 169964 - DNA, 17 bp, Arabidopsis thaliana
tttttgtggttaagtgg

SEQ ID NO: 169965 - DNA, 17 bp, Arabidopsis thaliana
tttttgtgtcctgacga

SEQ ID NO: 169966 - DNA, 17 bp, Arabidopsis thaliana
tttttgttacactttgc

SEQ ID NO: 169967 - DNA, 17 bp, Arabidopsis thaliana
tttttgttactatttga

SEQ ID NO: 169968 - DNA, 17 bp, Arabidopsis thaliana
tttttgttagaccatct

SEQ ID NO: 169969 - DNA, 17 bp, Arabidopsis thaliana
tttttgttcacgttgac

SEQ ID NO: 169970 - DNA, 17 bp, Arabidopsis thaliana
tttttgttcaggttcga

SEQ ID NO: 169971 - DNA, 17 bp, Arabidopsis thaliana
tttttgttgactgtgcc

SEQ ID NO: 169972 - DNA, 17 bp, Arabidopsis thaliana
tttttgttgcgcgagat

SEQ ID NO: 169973 - DNA, 17 bp, Arabidopsis thaliana
tttttgttgttagatga

SEQ ID NO: 169974 - DNA, 17 bp, Arabidopsis thaliana
tttttgtttggaaaccc

SEQ ID NO: 169975 - DNA, 17 bp, Arabidopsis thaliana
tttttgtttggagaccc

SEQ ID NO: 169976 - DNA, 17 bp, Arabidopsis thaliana
tttttgttttcgccaac

SEQ ID NO: 169977 - DNA, 17 bp, Arabidopsis thaliana
ttttttaaccgtgactg

SEQ ID NO: 169978 - DNA, 17 bp, Arabidopsis thaliana
ttttttaaccttctaac

SEQ ID NO: 169979 - DNA, 17 bp, Arabidopsis thaliana
ttttttaatcgcaactt

SEQ ID NO: 169980 - DNA, 17 bp, Arabidopsis thaliana
ttttttaatctaaccgc

SEQ ID NO: 169981 - DNA, 17 bp, Arabidopsis thaliana
ttttttacaaactgctc

SEQ ID NO: 169982 - DNA, 17 bp, Arabidopsis thaliana
ttttttaccatccgtgt

SEQ ID NO: 169983 - DNA, 17 bp, Arabidopsis thaliana
ttttttacgaacgggct

SEQ ID NO: 169984 - DNA, 17 bp, Arabidopsis thaliana
ttttttacgggacaggt

SEQ ID NO: 169985 - DNA, 17 bp, Arabidopsis thaliana
ttttttatccgatgaat

SEQ ID NO: 169986 - DNA, 17 bp, Arabidopsis thaliana
ttttttatctgtcgctg

SEQ ID NO: 169987 - DNA, 17 bp, Arabidopsis thaliana
ttttttcactccacatc

SEQ ID NO: 169988 - DNA, 17 bp, Arabidopsis thaliana
ttttttcagaagcgcta

SEQ ID NO: 169989 - DNA, 17 bp, Arabidopsis thaliana
ttttttcagacagtgac

SEQ ID NO: 169990 - DNA, 17 bp, Arabidopsis thaliana
ttttttcagcacgacgt

SEQ ID NO: 169991 - DNA, 17 bp, Arabidopsis thaliana
ttttttcagcgacatct

SEQ ID NO: 169992 - DNA, 17 bp, Arabidopsis thaliana
ttttttcataagtgagg

SEQ ID NO: 169993 - DNA, 17 bp, Arabidopsis thaliana
ttttttcatctgatgga

SEQ ID NO: 169994 - DNA, 17 bp, Arabidopsis thaliana
ttttttcattgaggctg

SEQ ID NO: 169995 - DNA, 17 bp, Arabidopsis thaliana
ttttttccctcttggca

SEQ ID NO: 169996 - DNA, 17 bp, Arabidopsis thaliana
ttttttccgagatgtta

SEQ ID NO: 169997 - DNA, 17 bp, Arabidopsis thaliana
ttttttccgatctgctg

SEQ ID NO: 169998 - DNA, 17 bp, Arabidopsis thaliana
ttttttccgttgcgact

SEQ ID NO: 169999 - DNA, 17 bp, Arabidopsis thaliana
ttttttccgtttcctaa

SEQ ID NO: 170000 - DNA, 17 bp, Arabidopsis thaliana
ttttttcctaagcgaca

SEQ ID NO: 170001 - DNA, 17 bp, Arabidopsis thaliana
ttttttcctgtcacgcg

SEQ ID NO: 170002 - DNA, 17 bp, Arabidopsis thaliana
ttttttcgaaaaggttt

SEQ ID NO: 170003 - DNA, 17 bp, Arabidopsis thaliana
ttttttcgatgtgggac

SEQ ID NO: 170004 - DNA, 17 bp, Arabidopsis thaliana
ttttttcggaatatcag

SEQ ID NO: 170005 - DNA, 17 bp, Arabidopsis thaliana
ttttttcggatatccgc

SEQ ID NO: 170006 - DNA, 17 bp, Arabidopsis thaliana
ttttttcggatatccgt

SEQ ID NO: 170007 - DNA, 17 bp, Arabidopsis thaliana
ttttttcgggtagtgag

SEQ ID NO: 170008 - DNA, 17 bp, Arabidopsis thaliana
ttttttcggtttctact

SEQ ID NO: 170009 - DNA, 17 bp, Arabidopsis thaliana
ttttttcggttttgcgg

SEQ ID NO: 170010 - DNA, 17 bp, Arabidopsis thaliana
ttttttcgtcgcggcca

SEQ ID NO: 170011 - DNA, 17 bp, Arabidopsis thaliana
ttttttctccaggaatt

SEQ ID NO: 170012 - DNA, 17 bp, Arabidopsis thaliana
ttttttctccatcaaga

SEQ ID NO: 170013 - DNA, 17 bp, Arabidopsis thaliana
ttttttctgctcaagac

SEQ ID NO: 170014 - DNA, 17 bp, Arabidopsis thaliana
ttttttctgtcaaccaa

SEQ ID NO: 170015 - DNA, 17 bp, Arabidopsis thaliana
ttttttcttcggaagag

SEQ ID NO: 170016 - DNA, 17 bp, Arabidopsis thaliana
ttttttctttctttctt

SEQ ID NO: 170017 - DNA, 17 bp, Arabidopsis thaliana
ttttttctttgatggcg

SEQ ID NO: 170018 - DNA, 17 bp, Arabidopsis thaliana
ttttttcttttgaaccg

SEQ ID NO: 170019 - DNA, 17 bp, Arabidopsis thaliana
ttttttgaaattttttt

SEQ ID NO: 170020 - DNA, 17 bp, Arabidopsis thaliana
ttttttgactgaccgac

SEQ ID NO: 170021 - DNA, 17 bp, Arabidopsis thaliana
ttttttgactgttgtcc

SEQ ID NO: 170022 - DNA, 17 bp, Arabidopsis thaliana
ttttttgcaagactatc

SEQ ID NO: 170023 - DNA, 17 bp, Arabidopsis thaliana
ttttttgccatgggacc

SEQ ID NO: 170024 - DNA, 17 bp, Arabidopsis thaliana
ttttttgcccgcgcagg

SEQ ID NO: 170025 - DNA, 17 bp, Arabidopsis thaliana
ttttttgcgacgactgc

SEQ ID NO: 170026 - DNA, 17 bp, Arabidopsis thaliana
ttttttgcggtgcggga

SEQ ID NO: 170027 - DNA, 17 bp, Arabidopsis thaliana
ttttttgctgaagacaa

SEQ ID NO: 170028 - DNA, 17 bp, Arabidopsis thaliana
ttttttggatagcaggt

SEQ ID NO: 170029 - DNA, 17 bp, Arabidopsis thaliana
ttttttggatctgcacc

SEQ ID NO: 170030 - DNA, 17 bp, Arabidopsis thaliana
ttttttggcgggaaact

SEQ ID NO: 170031 - DNA, 17 bp, Arabidopsis thaliana
ttttttgggacccaaag

SEQ ID NO: 170032 - DNA, 17 bp, Arabidopsis thaliana
ttttttgggcctttgga

SEQ ID NO: 170033 - DNA, 17 bp, Arabidopsis thaliana
ttttttgggtgcggttt

SEQ ID NO: 170034 - DNA, 17 bp, Arabidopsis thaliana
ttttttggtccagacca

SEQ ID NO: 170035 - DNA, 17 bp, Arabidopsis thaliana
ttttttggtctacgcga

SEQ ID NO: 170036 - DNA, 17 bp, Arabidopsis thaliana
ttttttgtccgttgcta

SEQ ID NO: 170037 - DNA, 17 bp, Arabidopsis thaliana
ttttttgtctgttgctc

SEQ ID NO: 170038 - DNA, 17 bp, Arabidopsis thaliana
ttttttgtgcaatgagg

SEQ ID NO: 170039 - DNA, 17 bp, Arabidopsis thaliana
ttttttgtgctatgggt

SEQ ID NO: 170040 - DNA, 17 bp, Arabidopsis thaliana
ttttttgttcactttgt

SEQ ID NO: 170041 - DNA, 17 bp, Arabidopsis thaliana
ttttttgtttcgtcggg

SEQ ID NO: 170042 - DNA, 17 bp, Arabidopsis thaliana
tttttttacccgtccag

SEQ ID NO: 170043 - DNA, 17 bp, Arabidopsis thaliana
tttttttaccttgttgc

SEQ ID NO: 170044 - DNA, 17 bp, Arabidopsis thaliana
tttttttacgggacggg

SEQ ID NO: 170045 - DNA, 17 bp, Arabidopsis thaliana
tttttttactccaaatt

SEQ ID NO: 170046 - DNA, 17 bp, Arabidopsis thaliana
tttttttagaccgtgag

SEQ ID NO: 170047 - DNA, 17 bp, Arabidopsis thaliana
tttttttccgttgcgac

SEQ ID NO: 170048 - DNA, 17 bp, Arabidopsis thaliana
tttttttccgtttccta

SEQ ID NO: 170049 - DNA, 17 bp, Arabidopsis thaliana
tttttttccttcatttg

SEQ ID NO: 170050 - DNA, 17 bp, Arabidopsis thaliana
tttttttcgccgtcact

SEQ ID NO: 170051 - DNA, 17 bp, Arabidopsis thaliana
tttttttcgctaaagac

SEQ ID NO: 170052 - DNA, 17 bp, Arabidopsis thaliana
tttttttcgctgaagct

SEQ ID NO: 170053 - DNA, 17 bp, Arabidopsis thaliana
tttttttcgtgatttgg

SEQ ID NO: 170054 - DNA, 17 bp, Arabidopsis thaliana
tttttttctgggctaaa

SEQ ID NO: 170055 - DNA, 17 bp, Arabidopsis thaliana
tttttttgcccaggccc

SEQ ID NO: 170056 - DNA, 17 bp, Arabidopsis thaliana
tttttttgcccaggcct

SEQ ID NO: 170057 - DNA, 17 bp, Arabidopsis thaliana
tttttttgcgcggatga

SEQ ID NO: 170058 - DNA, 17 bp, Arabidopsis thaliana
tttttttggagattttt

SEQ ID NO: 170059 - DNA, 17 bp, Arabidopsis thaliana
tttttttggcctggtca

SEQ ID NO: 170060 - DNA, 17 bp, Arabidopsis thaliana
tttttttgtgtggctgt

SEQ ID NO: 170061 - DNA, 17 bp, Arabidopsis thaliana
tttttttgtttgaccgg

SEQ ID NO: 170062 - DNA, 17 bp, Arabidopsis thaliana
tttttttgtttggagac

SEQ ID NO: 170063 - DNA, 17 bp, Arabidopsis thaliana
ttttttttacgggacag

SEQ ID NO: 170064 - DNA, 17 bp, Arabidopsis thaliana
ttttttttacgggatgg

SEQ ID NO: 170065 - DNA, 17 bp, Arabidopsis thaliana
ttttttttctttcactc

SEQ ID NO: 170066 - DNA, 17 bp, Arabidopsis thaliana
ttttttttgatcaggac

SEQ ID NO: 170067 - DNA, 17 bp, Arabidopsis thaliana
ttttttttgccaaggcc

SEQ ID NO: 170068 - DNA, 17 bp, Arabidopsis thaliana
ttttttttgctaggtcg

SEQ ID NO: 170069 - DNA, 17 bp, Arabidopsis thaliana
ttttttttgggcctaca

SEQ ID NO: 170070 - DNA, 17 bp, Arabidopsis thaliana
ttttttttggtcccaag

SEQ ID NO: 170071 - DNA, 17 bp, Arabidopsis thaliana
ttttttttgtcggccaa

SEQ ID NO: 170072 - DNA, 17 bp, Arabidopsis thaliana
aaaaaaaaaagcctttg

SEQ ID NO: 170073 - DNA, 17 bp, Arabidopsis thaliana
aaaaaaaaagggcgtcc

SEQ ID NO: 170074 - DNA, 17 bp, Arabidopsis thaliana
aaaaaaaaagtattgac

SEQ ID NO: 170075 - DNA, 17 bp, Arabidopsis thaliana
aaaaaaaaccatttctc

SEQ ID NO: 170076 - DNA, 17 bp, Arabidopsis thaliana
aaaaaaaagtattgacc

SEQ ID NO: 170077 - DNA, 17 bp, Arabidopsis thaliana
aaaaaaaatcagacaaa

SEQ ID NO: 170078 - DNA, 17 bp, Arabidopsis thaliana
aaaaaaaatccattggt

SEQ ID NO: 170079 - DNA, 17 bp, Arabidopsis thaliana
aaaaaaaattgttgccg

SEQ ID NO: 170080 - DNA, 17 bp, Arabidopsis thaliana
aaaaaaaccggccgacc

SEQ ID NO: 170081 - DNA, 17 bp, Arabidopsis thaliana
aaaaaaagtattgacca

SEQ ID NO: 170082 - DNA, 17 bp, Arabidopsis thaliana
aaaaaaattgttgccgt

SEQ ID NO: 170083 - DNA, 17 bp, Arabidopsis thaliana
aaaaaaatttggacaat

SEQ ID NO: 170084 - DNA, 17 bp, Arabidopsis thaliana
aaaaaacttggatttat

SEQ ID NO: 170085 - DNA, 17 bp, Arabidopsis thaliana
aaaaaagagttgcatct

SEQ ID NO: 170086 - DNA, 17 bp, Arabidopsis thaliana
aaaaaagccaggtatca

SEQ ID NO: 170087 - DNA, 17 bp, Arabidopsis thaliana
aaaaaagtattgaccaa

SEQ ID NO: 170088 - DNA, 17 bp, Arabidopsis thaliana
aaaaaagtctcttgtga

SEQ ID NO: 170089 - DNA, 17 bp, Arabidopsis thaliana
aaaaaatagttttgttt

SEQ ID NO: 170090 - DNA, 17 bp, Arabidopsis thaliana
aaaaaatattgaccaaa

SEQ ID NO: 170091 - DNA, 17 bp, Arabidopsis thaliana
aaaaaatcagacaaaaa

SEQ ID NO: 170092 - DNA, 17 bp, Arabidopsis thaliana
aaaaaatccgactaaaa

SEQ ID NO: 170093 - DNA, 17 bp, Arabidopsis thaliana
aaaaaatgggagatgta

SEQ ID NO: 170094 - DNA, 17 bp, Arabidopsis thaliana
aaaaaatgggagatgtc

SEQ ID NO: 170095 - DNA, 17 bp, Arabidopsis thaliana
aaaaaatttggaccatt

SEQ ID NO: 170096 - DNA, 17 bp, Arabidopsis thaliana
aaaaagaccagaaaaaa

SEQ ID NO: 170097 - DNA, 17 bp, Arabidopsis thaliana
aaaaagagttgcatcta

SEQ ID NO: 170098 - DNA, 17 bp, Arabidopsis thaliana
aaaaaggaaaatgatta

SEQ ID NO: 170099 - DNA, 17 bp, Arabidopsis thaliana
aaaaaggagcgacgggc

SEQ ID NO: 170100 - DNA, 17 bp, Arabidopsis thaliana
aaaaagtattgaccaaa

SEQ ID NO: 170101 - DNA, 17 bp, Arabidopsis thaliana
aaaaatagctcgacgcc

SEQ ID NO: 170102 - DNA, 17 bp, Arabidopsis thaliana
aaaaatcagacaaaaaa

SEQ ID NO: 170103 - DNA, 17 bp, Arabidopsis thaliana
aaaaatgcgtccttggc

SEQ ID NO: 170104 - DNA, 17 bp, Arabidopsis thaliana
aaaaattgggagatatc

SEQ ID NO: 170105 - DNA, 17 bp, Arabidopsis thaliana
aaaaattgtgccaaagg

SEQ ID NO: 170106 - DNA, 17 bp, Arabidopsis thaliana
aaaacaaaccataacaa

SEQ ID NO: 170107 - DNA, 17 bp, Arabidopsis thaliana
aaaacaacccacggtgc

SEQ ID NO: 170108 - DNA, 17 bp, Arabidopsis thaliana
aaaacagaatcaaggca

SEQ ID NO: 170109 - DNA, 17 bp, Arabidopsis thaliana
aaaacaggtatcgacaa

SEQ ID NO: 170110 - DNA, 17 bp, Arabidopsis thaliana
aaaacatcatttgtatg

SEQ ID NO: 170111 - DNA, 17 bp, Arabidopsis thaliana
aaaacatgattagggac

SEQ ID NO: 170112 - DNA, 17 bp, Arabidopsis thaliana
aaaacatgtgcaaatgc

SEQ ID NO: 170113 - DNA, 17 bp, Arabidopsis thaliana
aaaacccagccatttgg

SEQ ID NO: 170114 - DNA, 17 bp, Arabidopsis thaliana
aaaaccccattcatagt

SEQ ID NO: 170115 - DNA, 17 bp, Arabidopsis thaliana
aaaaccctattgattca

SEQ ID NO: 170116 - DNA, 17 bp, Arabidopsis thaliana
aaaaccctattgattcc

SEQ ID NO: 170117 - DNA, 17 bp, Arabidopsis thaliana
aaaacctgcatgggcca

SEQ ID NO: 170118 - DNA, 17 bp, Arabidopsis thaliana
aaaacgactctccgcaa

SEQ ID NO: 170119 - DNA, 17 bp, Arabidopsis thaliana
aaaacgactctcggcaa

SEQ ID NO: 170120 - DNA, 17 bp, Arabidopsis thaliana
aaaacgggaagaccatt

SEQ ID NO: 170121 - DNA, 17 bp, Arabidopsis thaliana
aaaactagctagataga

SEQ ID NO: 170122 - DNA, 17 bp, Arabidopsis thaliana
aaaactattttttcaaa

SEQ ID NO: 170123 - DNA, 17 bp, Arabidopsis thaliana
aaaactggttcggtcgg

SEQ ID NO: 170124 - DNA, 17 bp, Arabidopsis thaliana
aaaactttcctcatatt

SEQ ID NO: 170125 - DNA, 17 bp, Arabidopsis thaliana
aaaagacattggacata

SEQ ID NO: 170126 - DNA, 17 bp, Arabidopsis thaliana
aaaagagagggacgaat

SEQ ID NO: 170127 - DNA, 17 bp, Arabidopsis thaliana
aaaagagttgcatctac

SEQ ID NO: 170128 - DNA, 17 bp, Arabidopsis thaliana
aaaagatcgaatcttag

SEQ ID NO: 170129 - DNA, 17 bp, Arabidopsis thaliana
aaaaggaaaatgattac

SEQ ID NO: 170130 - DNA, 17 bp, Arabidopsis thaliana
aaaaggattggctctga

SEQ ID NO: 170131 - DNA, 17 bp, Arabidopsis thaliana
aaaaggcattggacata

SEQ ID NO: 170132 - DNA, 17 bp, Arabidopsis thaliana
aaaaggtcttacaaggt

SEQ ID NO: 170133 - DNA, 17 bp, Arabidopsis thaliana
aaaaggttggaagatct

SEQ ID NO: 170134 - DNA, 17 bp, Arabidopsis thaliana
aaaaggttggggagccc

SEQ ID NO: 170135 - DNA, 17 bp, Arabidopsis thaliana
aaaaggtttttcttaga

SEQ ID NO: 170136 - DNA, 17 bp, Arabidopsis thaliana
aaaagtattgaccaaaa

SEQ ID NO: 170137 - DNA, 17 bp, Arabidopsis thaliana
aaaagtctcttgtgaaa

SEQ ID NO: 170138 - DNA, 17 bp, Arabidopsis thaliana
aaaagtctcttgtgaat

SEQ ID NO: 170139 - DNA, 17 bp, Arabidopsis thaliana
aaaagttaactccaatc

SEQ ID NO: 170140 - DNA, 17 bp, Arabidopsis thaliana
aaaagttgtcgacggtg

SEQ ID NO: 170141 - DNA, 17 bp, Arabidopsis thaliana
aaaataaggaatgcttc

SEQ ID NO: 170142 - DNA, 17 bp, Arabidopsis thaliana
aaaatcttgatcgattt

SEQ ID NO: 170143 - DNA, 17 bp, Arabidopsis thaliana
aaaatcttgatgatgct

SEQ ID NO: 170144 - DNA, 17 bp, Arabidopsis thaliana
aaaatgattgtcagatc

SEQ ID NO: 170145 - DNA, 17 bp, Arabidopsis thaliana
aaaatggatccgtaact

SEQ ID NO: 170146 - DNA, 17 bp, Arabidopsis thaliana
aaaatggatggcgctta

SEQ ID NO: 170147 - DNA, 17 bp, Arabidopsis thaliana
aaaatgttccgagccaa

SEQ ID NO: 170148 - DNA, 17 bp, Arabidopsis thaliana
aaaattaactaaggtgt

SEQ ID NO: 170149 - DNA, 17 bp, Arabidopsis thaliana
aaaattcatccgcttgt

SEQ ID NO: 170150 - DNA, 17 bp, Arabidopsis thaliana
aaaattcgaaaagacaa

SEQ ID NO: 170151 - DNA, 17 bp, Arabidopsis thaliana
aaaattcgaaaagacac

SEQ ID NO: 170152 - DNA, 17 bp, Arabidopsis thaliana
aaaattctaccatctgg

SEQ ID NO: 170153 - DNA, 17 bp, Arabidopsis thaliana
aaacaaaaattgtgtag

SEQ ID NO: 170154 - DNA, 17 bp, Arabidopsis thaliana
aaacaaaatccccaaaa

SEQ ID NO: 170155 - DNA, 17 bp, Arabidopsis thaliana
aaacaaagattatcaag

SEQ ID NO: 170156 - DNA, 17 bp, Arabidopsis thaliana
aaacaaagattgtgtag

SEQ ID NO: 170157 - DNA, 17 bp, Arabidopsis thaliana
aaacaacccacggtgcc

SEQ ID NO: 170158 - DNA, 17 bp, Arabidopsis thaliana
aaacaaccctaaaagca

SEQ ID NO: 170159 - DNA, 17 bp, Arabidopsis thaliana
aaacaatatacgttgca

SEQ ID NO: 170160 - DNA, 17 bp, Arabidopsis thaliana
aaacacaaagctgatca

SEQ ID NO: 170161 - DNA, 17 bp, Arabidopsis thaliana
aaacactctccaaggga

SEQ ID NO: 170162 - DNA, 17 bp, Arabidopsis thaliana
aaacactctccaagggt

SEQ ID NO: 170163 - DNA, 17 bp, Arabidopsis thaliana
aaacagatgctgcaagg

SEQ ID NO: 170164 - DNA, 17 bp, Arabidopsis thaliana
aaacagatgggcaacca

SEQ ID NO: 170165 - DNA, 17 bp, Arabidopsis thaliana
aaacagggctcttggtt

SEQ ID NO: 170166 - DNA, 17 bp, Arabidopsis thaliana
aaacagtgatgaaaacg

SEQ ID NO: 170167 - DNA, 17 bp, Arabidopsis thaliana
aaacataaaatgaacaa

SEQ ID NO: 170168 - DNA, 17 bp, Arabidopsis thaliana
aaacatagcattgcgat

SEQ ID NO: 170169 - DNA, 17 bp, Arabidopsis thaliana
aaacatatcgcacaata

SEQ ID NO: 170170 - DNA, 17 bp, Arabidopsis thaliana
aaacatcgactaggcga

SEQ ID NO: 170171 - DNA, 17 bp, Arabidopsis thaliana
aaaccaaagatccatct

SEQ ID NO: 170172 - DNA, 17 bp, Arabidopsis thaliana
aaaccaacagggattgc

SEQ ID NO: 170173 - DNA, 17 bp, Arabidopsis thaliana
aaaccagcacagaggca

SEQ ID NO: 170174 - DNA, 17 bp, Arabidopsis thaliana
aaaccattaaccttaaa

SEQ ID NO: 170175 - DNA, 17 bp, Arabidopsis thaliana
aaaccccaaaaccatta

SEQ ID NO: 170176 - DNA, 17 bp, Arabidopsis thaliana
aaacccggtatgcctgt

SEQ ID NO: 170177 - DNA, 17 bp, Arabidopsis thaliana
aaacccgtctgatagcg

SEQ ID NO: 170178 - DNA, 17 bp, Arabidopsis thaliana
aaaccctattgattccc

SEQ ID NO: 170179 - DNA, 17 bp, Arabidopsis thaliana
aaaccgaaaccgtctta

SEQ ID NO: 170180 - DNA, 17 bp, Arabidopsis thaliana
aaaccgaccgagccagt

SEQ ID NO: 170181 - DNA, 17 bp, Arabidopsis thaliana
aaacctaccctgctcag

SEQ ID NO: 170182 - DNA, 17 bp, Arabidopsis thaliana
aaacctatctcgttgag

SEQ ID NO: 170183 - DNA, 17 bp, Arabidopsis thaliana
aaacgacgctgcaggca

SEQ ID NO: 170184 - DNA, 17 bp, Arabidopsis thaliana
aaacgactctcggcaac

SEQ ID NO: 170185 - DNA, 17 bp, Arabidopsis thaliana
aaacgagagcgaatgga

SEQ ID NO: 170186 - DNA, 17 bp, Arabidopsis thaliana
aaacgatgccgaccagg

SEQ ID NO: 170187 - DNA, 17 bp, Arabidopsis thaliana
aaacgattatcgaatct

SEQ ID NO: 170188 - DNA, 17 bp, Arabidopsis thaliana
aaacgcctaattccggt

SEQ ID NO: 170189 - DNA, 17 bp, Arabidopsis thaliana
aaacggccacgaggtgc

SEQ ID NO: 170190 - DNA, 17 bp, Arabidopsis thaliana
aaacggcgggagtaact

SEQ ID NO: 170191 - DNA, 17 bp, Arabidopsis thaliana
aaacgggagggttattc

SEQ ID NO: 170192 - DNA, 17 bp, Arabidopsis thaliana
aaacggtctttgggata

SEQ ID NO: 170193 - DNA, 17 bp, Arabidopsis thaliana
aaacgtgaatgatgcac

SEQ ID NO: 170194 - DNA, 17 bp, Arabidopsis thaliana
aaacgttttattatttt

SEQ ID NO: 170195 - DNA, 17 bp, Arabidopsis thaliana
aaactattcacttgata

SEQ ID NO: 170196 - DNA, 17 bp, Arabidopsis thaliana
aaactattcacttgatt

SEQ ID NO: 170197 - DNA, 17 bp, Arabidopsis thaliana
aaactcaacagtcaaca

SEQ ID NO: 170198 - DNA, 17 bp, Arabidopsis thaliana
aaactcacggccagata

SEQ ID NO: 170199 - DNA, 17 bp, Arabidopsis thaliana
aaactcaggagggatag

SEQ ID NO: 170200 - DNA, 17 bp, Arabidopsis thaliana
aaactcccagtggtagg

SEQ ID NO: 170201 - DNA, 17 bp, Arabidopsis thaliana
aaactcgacggatcgca

SEQ ID NO: 170202 - DNA, 17 bp, Arabidopsis thaliana
aaactcgtctaggcgat

SEQ ID NO: 170203 - DNA, 17 bp, Arabidopsis thaliana
aaactcgtgaactcggg

SEQ ID NO: 170204 - DNA, 17 bp, Arabidopsis thaliana
aaactctggtggaagca

SEQ ID NO: 170205 - DNA, 17 bp, Arabidopsis thaliana
aaactgccatcccgact

SEQ ID NO: 170206 - DNA, 17 bp, Arabidopsis thaliana
aaactgcgaatggctca

SEQ ID NO: 170207 - DNA, 17 bp, Arabidopsis thaliana
aaactgtgtcgtgctgg

SEQ ID NO: 170208 - DNA, 17 bp, Arabidopsis thaliana
aaactgttagggtctaa

SEQ ID NO: 170209 - DNA, 17 bp, Arabidopsis thaliana
aaacttaccaggtccag

SEQ ID NO: 170210 - DNA, 17 bp, Arabidopsis thaliana
aaacttgatcgctcaaa

SEQ ID NO: 170211 - DNA, 17 bp, Arabidopsis thaliana
aaactttcctcatattg

SEQ ID NO: 170212 - DNA, 17 bp, Arabidopsis thaliana
aaactttggctagtcac

SEQ ID NO: 170213 - DNA, 17 bp, Arabidopsis thaliana
aaacttttgttttcacc

SEQ ID NO: 170214 - DNA, 17 bp, Arabidopsis thaliana
aaagaaaaaatccgact

SEQ ID NO: 170215 - DNA, 17 bp, Arabidopsis thaliana
aaagaagatgacagcga

SEQ ID NO: 170216 - DNA, 17 bp, Arabidopsis thaliana
aaagaatagatacgatt

SEQ ID NO: 170217 - DNA, 17 bp, Arabidopsis thaliana
aaagaatcgagtgattc

SEQ ID NO: 170218 - DNA, 17 bp, Arabidopsis thaliana
aaagaatgtgagttttc

SEQ ID NO: 170219 - DNA, 17 bp, Arabidopsis thaliana
aaagacaagagccaaga

SEQ ID NO: 170220 - DNA, 17 bp, Arabidopsis thaliana
aaagacattgcacatat

SEQ ID NO: 170221 - DNA, 17 bp, Arabidopsis thaliana
aaagacattggacatat

SEQ ID NO: 170222 - DNA, 17 bp, Arabidopsis thaliana
aaagacctatgtttcta

SEQ ID NO: 170223 - DNA, 17 bp, Arabidopsis thaliana
aaagactaatcgaacca

SEQ ID NO: 170224 - DNA, 17 bp, Arabidopsis thaliana
aaagactagcagattgt

SEQ ID NO: 170225 - DNA, 17 bp, Arabidopsis thaliana
aaagactcgatggttga

SEQ ID NO: 170226 - DNA, 17 bp, Arabidopsis thaliana
aaagactcggcattcag

SEQ ID NO: 170227 - DNA, 17 bp, Arabidopsis thaliana
aaagagaataatgaaaa

SEQ ID NO: 170228 - DNA, 17 bp, Arabidopsis thaliana
aaagagatggggtctta

SEQ ID NO: 170229 - DNA, 17 bp, Arabidopsis thaliana
aaagagatgggtcttac

SEQ ID NO: 170230 - DNA, 17 bp, Arabidopsis thaliana
aaagagtaagatggata

SEQ ID NO: 170231 - DNA, 17 bp, Arabidopsis thaliana
aaagataaggaaaacca

SEQ ID NO: 170232 - DNA, 17 bp, Arabidopsis thaliana
aaagataaggaaaaccc

SEQ ID NO: 170233 - DNA, 17 bp, Arabidopsis thaliana
aaagatcgtagcccctt

SEQ ID NO: 170234 - DNA, 17 bp, Arabidopsis thaliana
aaagatctggtgatgaa

SEQ ID NO: 170235 - DNA, 17 bp, Arabidopsis thaliana
aaagatgcagatcataa

SEQ ID NO: 170236 - DNA, 17 bp, Arabidopsis thaliana
aaagattacccgggcct

SEQ ID NO: 170237 - DNA, 17 bp, Arabidopsis thaliana
aaagatttagcaggcca

SEQ ID NO: 170238 - DNA, 17 bp, Arabidopsis thaliana
aaagcaagcctacgctc

SEQ ID NO: 170239 - DNA, 17 bp, Arabidopsis thaliana
aaagcactgagttctgc

SEQ ID NO: 170240 - DNA, 17 bp, Arabidopsis thaliana
aaagcatttgccaagga

SEQ ID NO: 170241 - DNA, 17 bp, Arabidopsis thaliana
aaagccaccagccaagt

SEQ ID NO: 170242 - DNA, 17 bp, Arabidopsis thaliana
aaagcccctgtattttg

SEQ ID NO: 170243 - DNA, 17 bp, Arabidopsis thaliana
aaagcgtcgtgctgcta

SEQ ID NO: 170244 - DNA, 17 bp, Arabidopsis thaliana
aaagcgttctgtgatcg

SEQ ID NO: 170245 - DNA, 17 bp, Arabidopsis thaliana
aaagctcaggagggata

SEQ ID NO: 170246 - DNA, 17 bp, Arabidopsis thaliana
aaagctcaggaggggta

SEQ ID NO: 170247 - DNA, 17 bp, Arabidopsis thaliana
aaagctcaggtaagata

SEQ ID NO: 170248 - DNA, 17 bp, Arabidopsis thaliana
aaagctcgaacccttga

SEQ ID NO: 170249 - DNA, 17 bp, Arabidopsis thaliana
aaagcttcagaagcaga

SEQ ID NO: 170250 - DNA, 17 bp, Arabidopsis thaliana
aaagcttcagaagcagt

SEQ ID NO: 170251 - DNA, 17 bp, Arabidopsis thaliana
aaaggaaaatgattaca

SEQ ID NO: 170252 - DNA, 17 bp, Arabidopsis thaliana
aaaggatggtgagggac

SEQ ID NO: 170253 - DNA, 17 bp, Arabidopsis thaliana
aaaggattctacccgcc

SEQ ID NO: 170254 - DNA, 17 bp, Arabidopsis thaliana
aaaggcacgtgtcgttg

SEQ ID NO: 170255 - DNA, 17 bp, Arabidopsis thaliana
aaaggctcgcagagaaa

SEQ ID NO: 170256 - DNA, 17 bp, Arabidopsis thaliana
aaagggtgttgttcgat

SEQ ID NO: 170257 - DNA, 17 bp, Arabidopsis thaliana
aaaggtcgacgcgggct

SEQ ID NO: 170258 - DNA, 17 bp, Arabidopsis thaliana
aaaggttgtcaaccaga

SEQ ID NO: 170259 - DNA, 17 bp, Arabidopsis thaliana
aaaggttgtcaaccagg

SEQ ID NO: 170260 - DNA, 17 bp, Arabidopsis thaliana
aaaggtttgatgatgaa

SEQ ID NO: 170261 - DNA, 17 bp, Arabidopsis thaliana
aaagtaagatgatttct

SEQ ID NO: 170262 - DNA, 17 bp, Arabidopsis thaliana
aaagtaatcgttgttta

SEQ ID NO: 170263 - DNA, 17 bp, Arabidopsis thaliana
aaagtagatgttggtat

SEQ ID NO: 170264 - DNA, 17 bp, Arabidopsis thaliana
aaagtatagaaacgctc

SEQ ID NO: 170265 - DNA, 17 bp, Arabidopsis thaliana
aaagtattagcaactgt

SEQ ID NO: 170266 - DNA, 17 bp, Arabidopsis thaliana
aaagtattgaccaaaaa

SEQ ID NO: 170267 - DNA, 17 bp, Arabidopsis thaliana
aaagtcaggtgccttct

SEQ ID NO: 170268 - DNA, 17 bp, Arabidopsis thaliana
aaagtcgacagtttggt

SEQ ID NO: 170269 - DNA, 17 bp, Arabidopsis thaliana
aaagtctcttgtgaata

SEQ ID NO: 170270 - DNA, 17 bp, Arabidopsis thaliana
aaagtgactacatcggg

SEQ ID NO: 170271 - DNA, 17 bp, Arabidopsis thaliana
aaagtgactacatttgg

SEQ ID NO: 170272 - DNA, 17 bp, Arabidopsis thaliana
aaagtgattgtcagatc

SEQ ID NO: 170273 - DNA, 17 bp, Arabidopsis thaliana
aaagtgtctttgtagct

SEQ ID NO: 170274 - DNA, 17 bp, Arabidopsis thaliana
aaagtgtttcgccgttg

SEQ ID NO: 170275 - DNA, 17 bp, Arabidopsis thaliana
aaagttaaagcagcgac

SEQ ID NO: 170276 - DNA, 17 bp, Arabidopsis thaliana
aaagttcccctatgata

SEQ ID NO: 170277 - DNA, 17 bp, Arabidopsis thaliana
aaataaattcagtttcg

SEQ ID NO: 170278 - DNA, 17 bp, Arabidopsis thaliana
aaataacaaaatgagca

SEQ ID NO: 170279 - DNA, 17 bp, Arabidopsis thaliana
aaataaggaatgcttca

SEQ ID NO: 170280 - DNA, 17 bp, Arabidopsis thaliana
aaatacaaggttgtaaa

SEQ ID NO: 170281 - DNA, 17 bp, Arabidopsis thaliana
aaatacagctgagcagc

SEQ ID NO: 170282 - DNA, 17 bp, Arabidopsis thaliana
aaatacatgcgctttta

SEQ ID NO: 170283 - DNA, 17 bp, Arabidopsis thaliana
aaatacgcgacggggta

SEQ ID NO: 170284 - DNA, 17 bp, Arabidopsis thaliana
aaatagccatccgaccc

SEQ ID NO: 170285 - DNA, 17 bp, Arabidopsis thaliana
aaataggagtggcaccg

SEQ ID NO: 170286 - DNA, 17 bp, Arabidopsis thaliana
aaatcagagaccatccc

SEQ ID NO: 170287 - DNA, 17 bp, Arabidopsis thaliana
aaatcatttgccaagga

SEQ ID NO: 170288 - DNA, 17 bp, Arabidopsis thaliana
aaatccacttgtctcgt

SEQ ID NO: 170289 - DNA, 17 bp, Arabidopsis thaliana
aaatccgacccgtgggc

SEQ ID NO: 170290 - DNA, 17 bp, Arabidopsis thaliana
aaatccggaggaccgag

SEQ ID NO: 170291 - DNA, 17 bp, Arabidopsis thaliana
aaatcctattggacgca

SEQ ID NO: 170292 - DNA, 17 bp, Arabidopsis thaliana
aaatcctcggacccggt

SEQ ID NO: 170293 - DNA, 17 bp, Arabidopsis thaliana
aaatcctttgcagacga

SEQ ID NO: 170294 - DNA, 17 bp, Arabidopsis thaliana
aaatcgtagttttacgt

SEQ ID NO: 170295 - DNA, 17 bp, Arabidopsis thaliana
aaatcgtattgagagcc

SEQ ID NO: 170296 - DNA, 17 bp, Arabidopsis thaliana
aaatctaattcacaaga

SEQ ID NO: 170297 - DNA, 17 bp, Arabidopsis thaliana
aaatctcactaattacg

SEQ ID NO: 170298 - DNA, 17 bp, Arabidopsis thaliana
aaatctcatttacttga

SEQ ID NO: 170299 - DNA, 17 bp, Arabidopsis thaliana
aaatctctactatgctc

SEQ ID NO: 170300 - DNA, 17 bp, Arabidopsis thaliana
aaatctgcttagtggaa

SEQ ID NO: 170301 - DNA, 17 bp, Arabidopsis thaliana
aaatcttgatcgattta

SEQ ID NO: 170302 - DNA, 17 bp, Arabidopsis thaliana
aaatcttgatgatgctg

SEQ ID NO: 170303 - DNA, 17 bp, Arabidopsis thaliana
aaatgaataccagttac

SEQ ID NO: 170304 - DNA, 17 bp, Arabidopsis thaliana
aaatgaccgctacactg

SEQ ID NO: 170305 - DNA, 17 bp, Arabidopsis thaliana
aaatgattgtcagatct

SEQ ID NO: 170306 - DNA, 17 bp, Arabidopsis thaliana
aaatggaacaacctggc

SEQ ID NO: 170307 - DNA, 17 bp, Arabidopsis thaliana
aaatggatccgtaactt

SEQ ID NO: 170308 - DNA, 17 bp, Arabidopsis thaliana
aaatgttgttacctaca

SEQ ID NO: 170309 - DNA, 17 bp, Arabidopsis thaliana
aaattacccaatcctga

SEQ ID NO: 170310 - DNA, 17 bp, Arabidopsis thaliana
aaattcaggagaacatg

SEQ ID NO: 170311 - DNA, 17 bp, Arabidopsis thaliana
aaattcatccgcttgtt

SEQ ID NO: 170312 - DNA, 17 bp, Arabidopsis thaliana
aaattcgaatcttagcg

SEQ ID NO: 170313 - DNA, 17 bp, Arabidopsis thaliana
aaattgaccaggaagga

SEQ ID NO: 170314 - DNA, 17 bp, Arabidopsis thaliana
aaattgcactgcctctt

SEQ ID NO: 170315 - DNA, 17 bp, Arabidopsis thaliana
aaatttcatcgtgatgg

SEQ ID NO: 170316 - DNA, 17 bp, Arabidopsis thaliana
aaatttggaccatttct

SEQ ID NO: 170317 - DNA, 17 bp, Arabidopsis thaliana
aaatttggatcatctct

SEQ ID NO: 170318 - DNA, 17 bp, Arabidopsis thaliana
aaattttaaaaaggaaa

SEQ ID NO: 170319 - DNA, 17 bp, Arabidopsis thaliana
aacaaaaattgtgtaga

SEQ ID NO: 170320 - DNA, 17 bp, Arabidopsis thaliana
aacaaaataaggaatgc

SEQ ID NO: 170321 - DNA, 17 bp, Arabidopsis thaliana
aacaaaatgagcactaa

SEQ ID NO: 170322 - DNA, 17 bp, Arabidopsis thaliana
aacaaaatgagcactac

SEQ ID NO: 170323 - DNA, 17 bp, Arabidopsis thaliana
aacaaaatttctaaacc

SEQ ID NO: 170324 - DNA, 17 bp, Arabidopsis thaliana
aacaaactcggtgtaca

SEQ ID NO: 170325 - DNA, 17 bp, Arabidopsis thaliana
aacaaactggtaaacaa

SEQ ID NO: 170326 - DNA, 17 bp, Arabidopsis thaliana
aacaaagaggaagatag

SEQ ID NO: 170327 - DNA, 17 bp, Arabidopsis thaliana
aacaaagattatcaaga

SEQ ID NO: 170328 - DNA, 17 bp, Arabidopsis thaliana
aacaaagtataccttga

SEQ ID NO: 170329 - DNA, 17 bp, Arabidopsis thaliana
aacaaagtttttgttga

SEQ ID NO: 170330 - DNA, 17 bp, Arabidopsis thaliana
aacaacagcgagttgcg

SEQ ID NO: 170331 - DNA, 17 bp, Arabidopsis thaliana
aacaacataatcaagca

SEQ ID NO: 170332 - DNA, 17 bp, Arabidopsis thaliana
aacaaccacctgctacc

SEQ ID NO: 170333 - DNA, 17 bp, Arabidopsis thaliana
aacaacccacggtgcca

SEQ ID NO: 170334 - DNA, 17 bp, Arabidopsis thaliana
aacaactgcgaaagcaa

SEQ ID NO: 170335 - DNA, 17 bp, Arabidopsis thaliana
aacaactgcgaaagcat

SEQ ID NO: 170336 - DNA, 17 bp, Arabidopsis thaliana
aacaacttcattaggca

SEQ ID NO: 170337 - DNA, 17 bp, Arabidopsis thaliana
aacaagaccaagagaga

SEQ ID NO: 170338 - DNA, 17 bp, Arabidopsis thaliana
aacaagagtgaagacga

SEQ ID NO: 170339 - DNA, 17 bp, Arabidopsis thaliana
aacaagagtgaagacgg

SEQ ID NO: 170340 - DNA, 17 bp, Arabidopsis thaliana
aacaagagttacaacga

SEQ ID NO: 170341 - DNA, 17 bp, Arabidopsis thaliana
aacaagcgaatgagtca

SEQ ID NO: 170342 - DNA, 17 bp, Arabidopsis thaliana
aacaagcgaatgagtta

SEQ ID NO: 170343 - DNA, 17 bp, Arabidopsis thaliana
aacaagcggatgaatta

SEQ ID NO: 170344 - DNA, 17 bp, Arabidopsis thaliana
aacaagcggatgaattt

SEQ ID NO: 170345 - DNA, 17 bp, Arabidopsis thaliana
aacaaggctcgaacctg

SEQ ID NO: 170346 - DNA, 17 bp, Arabidopsis thaliana
aacaatatacgttgcat

SEQ ID NO: 170347 - DNA, 17 bp, Arabidopsis thaliana
aacaatgtcttgctgta

SEQ ID NO: 170348 - DNA, 17 bp, Arabidopsis thaliana
aacacaaggtgccgtag

SEQ ID NO: 170349 - DNA, 17 bp, Arabidopsis thaliana
aacacacgggagaccag

SEQ ID NO: 170350 - DNA, 17 bp, Arabidopsis thaliana
aacacatatcaggagtc

SEQ ID NO: 170351 - DNA, 17 bp, Arabidopsis thaliana
aacacatgtagaggaca

SEQ ID NO: 170352 - DNA, 17 bp, Arabidopsis thaliana
aacacccattacaaaca

SEQ ID NO: 170353 - DNA, 17 bp, Arabidopsis thaliana
aacacccattacaagcc

SEQ ID NO: 170354 - DNA, 17 bp, Arabidopsis thaliana
aacacgagtcgcttcca

SEQ ID NO: 170355 - DNA, 17 bp, Arabidopsis thaliana
aacactctaattcatgg

SEQ ID NO: 170356 - DNA, 17 bp, Arabidopsis thaliana
aacactctccaagggtt

SEQ ID NO: 170357 - DNA, 17 bp, Arabidopsis thaliana
aacacttatttctgcag

SEQ ID NO: 170358 - DNA, 17 bp, Arabidopsis thaliana
aacacttggtatgggac

SEQ ID NO: 170359 - DNA, 17 bp, Arabidopsis thaliana
aacagatgctgcaaggg

SEQ ID NO: 170360 - DNA, 17 bp, Arabidopsis thaliana
aacagcgccggaggcac

SEQ ID NO: 170361 - DNA, 17 bp, Arabidopsis thaliana
aacaggcgatttgcgag

SEQ ID NO: 170362 - DNA, 17 bp, Arabidopsis thaliana
aacaggggaatcaggta

SEQ ID NO: 170363 - DNA, 17 bp, Arabidopsis thaliana
aacaggggaatcaggtg

SEQ ID NO: 170364 - DNA, 17 bp, Arabidopsis thaliana
aacagggtcttctttcc

SEQ ID NO: 170365 - DNA, 17 bp, Arabidopsis thaliana
aacaggtctgtgatgca

SEQ ID NO: 170366 - DNA, 17 bp, Arabidopsis thaliana
aacaggtctgtgatgcc

SEQ ID NO: 170367 - DNA, 17 bp, Arabidopsis thaliana
aacagtgacgagtcagt

SEQ ID NO: 170368 - DNA, 17 bp, Arabidopsis thaliana
aacagtgatgagtcagt

SEQ ID NO: 170369 - DNA, 17 bp, Arabidopsis thaliana
aacagttctcacccatc

SEQ ID NO: 170370 - DNA, 17 bp, Arabidopsis thaliana
aacagttgatgatacaa

SEQ ID NO: 170371 - DNA, 17 bp, Arabidopsis thaliana
aacatacctccagagat

SEQ ID NO: 170372 - DNA, 17 bp, Arabidopsis thaliana
aacatactggtaaatgg

SEQ ID NO: 170373 - DNA, 17 bp, Arabidopsis thaliana
aacatagcatattctaa

SEQ ID NO: 170374 - DNA, 17 bp, Arabidopsis thaliana
aacatagcgtagagaaa

SEQ ID NO: 170375 - DNA, 17 bp, Arabidopsis thaliana
aacatagcgtattctaa

SEQ ID NO: 170376 - DNA, 17 bp, Arabidopsis thaliana
aacatagcgtattctta

SEQ ID NO: 170377 - DNA, 17 bp, Arabidopsis thaliana
aacatccagatttgctt

SEQ ID NO: 170378 - DNA, 17 bp, Arabidopsis thaliana
aacatcggcgcttgttc

SEQ ID NO: 170379 - DNA, 17 bp, Arabidopsis thaliana
aacatctggtctaatac

SEQ ID NO: 170380 - DNA, 17 bp, Arabidopsis thaliana
aacatgaactttgattt

SEQ ID NO: 170381 - DNA, 17 bp, Arabidopsis thaliana
aacatgtgacgatgtca

SEQ ID NO: 170382 - DNA, 17 bp, Arabidopsis thaliana
aacatgttggacaagcc

SEQ ID NO: 170383 - DNA, 17 bp, Arabidopsis thaliana
aacattctacggtgtta

SEQ ID NO: 170384 - DNA, 17 bp, Arabidopsis thaliana
aacattgagctgatcta

SEQ ID NO: 170385 - DNA, 17 bp, Arabidopsis thaliana
aacatttggtctaactc

SEQ ID NO: 170386 - DNA, 17 bp, Arabidopsis thaliana
aaccacattttttgtcg

SEQ ID NO: 170387 - DNA, 17 bp, Arabidopsis thaliana
aaccagacaggtactca

SEQ ID NO: 170388 - DNA, 17 bp, Arabidopsis thaliana
aaccagatctggttgac

SEQ ID NO: 170389 - DNA, 17 bp, Arabidopsis thaliana
aaccagctgatgcgcgg

SEQ ID NO: 170390 - DNA, 17 bp, Arabidopsis thaliana
aaccaggcgggtccgac

SEQ ID NO: 170391 - DNA, 17 bp, Arabidopsis thaliana
aaccagggatcagcgga

SEQ ID NO: 170392 - DNA, 17 bp, Arabidopsis thaliana
aaccagggttaagggcc

SEQ ID NO: 170393 - DNA, 17 bp, Arabidopsis thaliana
aaccatcatcatcatgg

SEQ ID NO: 170394 - DNA, 17 bp, Arabidopsis thaliana
aacccacggtgccaccc

SEQ ID NO: 170395 - DNA, 17 bp, Arabidopsis thaliana
aacccacggtgccactc

SEQ ID NO: 170396 - DNA, 17 bp, Arabidopsis thaliana
aaccccgacttatggaa

SEQ ID NO: 170397 - DNA, 17 bp, Arabidopsis thaliana
aacccgtctgatagcgc

SEQ ID NO: 170398 - DNA, 17 bp, Arabidopsis thaliana
aaccctaaacgcaggcg

SEQ ID NO: 170399 - DNA, 17 bp, Arabidopsis thaliana
aaccctatgacgggagt

SEQ ID NO: 170400 - DNA, 17 bp, Arabidopsis thaliana
aaccctcaagatgggca

SEQ ID NO: 170401 - DNA, 17 bp, Arabidopsis thaliana
aaccctcctccctgctt

SEQ ID NO: 170402 - DNA, 17 bp, Arabidopsis thaliana
aaccctgctgaaggtcc

SEQ ID NO: 170403 - DNA, 17 bp, Arabidopsis thaliana
aaccctggtgcgactcc

SEQ ID NO: 170404 - DNA, 17 bp, Arabidopsis thaliana
aaccctggtttagtcac

SEQ ID NO: 170405 - DNA, 17 bp, Arabidopsis thaliana
aaccgaccgagccagtt

SEQ ID NO: 170406 - DNA, 17 bp, Arabidopsis thaliana
aaccgaggaggttattt

SEQ ID NO: 170407 - DNA, 17 bp, Arabidopsis thaliana
aaccgcaggagacaact

SEQ ID NO: 170408 - DNA, 17 bp, Arabidopsis thaliana
aaccgcatcaggtctcc

SEQ ID NO: 170409 - DNA, 17 bp, Arabidopsis thaliana
aaccggaaccggggacg

SEQ ID NO: 170410 - DNA, 17 bp, Arabidopsis thaliana
aaccggaagccgggtta

SEQ ID NO: 170411 - DNA, 17 bp, Arabidopsis thaliana
aaccgggtggagaatga

SEQ ID NO: 170412 - DNA, 17 bp, Arabidopsis thaliana
aaccgggtggagaatgg

SEQ ID NO: 170413 - DNA, 17 bp, Arabidopsis thaliana
aacctaataagtatcca

SEQ ID NO: 170414 - DNA, 17 bp, Arabidopsis thaliana
aacctacgtagcttcgc

SEQ ID NO: 170415 - DNA, 17 bp, Arabidopsis thaliana
aacctatttgccgtcgt

SEQ ID NO: 170416 - DNA, 17 bp, Arabidopsis thaliana
aacctcaggagggatag

SEQ ID NO: 170417 - DNA, 17 bp, Arabidopsis thaliana
aacctcgaggtgttgaa

SEQ ID NO: 170418 - DNA, 17 bp, Arabidopsis thaliana
aacctctgcatccagcg

SEQ ID NO: 170419 - DNA, 17 bp, Arabidopsis thaliana
aacctgcggaaggatca

SEQ ID NO: 170420 - DNA, 17 bp, Arabidopsis thaliana
aacctggaatatgtcca

SEQ ID NO: 170421 - DNA, 17 bp, Arabidopsis thaliana
aacctggtgttttgatc

SEQ ID NO: 170422 - DNA, 17 bp, Arabidopsis thaliana
aacctgtagatggatca

SEQ ID NO: 170423 - DNA, 17 bp, Arabidopsis thaliana
aaccttaaaactgatac

SEQ ID NO: 170424 - DNA, 17 bp, Arabidopsis thaliana
aaccttgggatgggtcg

SEQ ID NO: 170425 - DNA, 17 bp, Arabidopsis thaliana
aaccttgtcactgcagt

SEQ ID NO: 170426 - DNA, 17 bp, Arabidopsis thaliana
aaccttgttacgacttc

SEQ ID NO: 170427 - DNA, 17 bp, Arabidopsis thaliana
aacctttggcctcggca

SEQ ID NO: 170428 - DNA, 17 bp, Arabidopsis thaliana
aacgaacgagacctcag

SEQ ID NO: 170429 - DNA, 17 bp, Arabidopsis thaliana
aacgaaggttactatta

SEQ ID NO: 170430 - DNA, 17 bp, Arabidopsis thaliana
aacgaaggttactattg

SEQ ID NO: 170431 - DNA, 17 bp, Arabidopsis thaliana
aacgaattcagactgtg

SEQ ID NO: 170432 - DNA, 17 bp, Arabidopsis thaliana
aacgacacgtgcctttg

SEQ ID NO: 170433 - DNA, 17 bp, Arabidopsis thaliana
aacgacactcggcaaca

SEQ ID NO: 170434 - DNA, 17 bp, Arabidopsis thaliana
aacgactctcggcaaca

SEQ ID NO: 170435 - DNA, 17 bp, Arabidopsis thaliana
aacgactctcggcaacg

SEQ ID NO: 170436 - DNA, 17 bp, Arabidopsis thaliana
aacgactctcggcaatg

SEQ ID NO: 170437 - DNA, 17 bp, Arabidopsis thaliana
aacgagacctcagcctg

SEQ ID NO: 170438 - DNA, 17 bp, Arabidopsis thaliana
aacgagagcgaatggac

SEQ ID NO: 170439 - DNA, 17 bp, Arabidopsis thaliana
aacgaggttccattgga

SEQ ID NO: 170440 - DNA, 17 bp, Arabidopsis thaliana
aacgagtccaagtttgt

SEQ ID NO: 170441 - DNA, 17 bp, Arabidopsis thaliana
aacgagttcacacctta

SEQ ID NO: 170442 - DNA, 17 bp, Arabidopsis thaliana
aacgagttcacaccttg

SEQ ID NO: 170443 - DNA, 17 bp, Arabidopsis thaliana
aacgatgccgaccaggg

SEQ ID NO: 170444 - DNA, 17 bp, Arabidopsis thaliana
aacgcaagttgcgcccc

SEQ ID NO: 170445 - DNA, 17 bp, Arabidopsis thaliana
aacgcaatgtgatttct

SEQ ID NO: 170446 - DNA, 17 bp, Arabidopsis thaliana
aacgcaggtgtcctaag

SEQ ID NO: 170447 - DNA, 17 bp, Arabidopsis thaliana
aacgcataagcgctcaa

SEQ ID NO: 170448 - DNA, 17 bp, Arabidopsis thaliana
aacgcatgagaggttgg

SEQ ID NO: 170449 - DNA, 17 bp, Arabidopsis thaliana
aacgcgacgatacctcc

SEQ ID NO: 170450 - DNA, 17 bp, Arabidopsis thaliana
aacgctagcctcgttaa

SEQ ID NO: 170451 - DNA, 17 bp, Arabidopsis thaliana
aacgctatgctggactt

SEQ ID NO: 170452 - DNA, 17 bp, Arabidopsis thaliana
aacgctctccagtaaca

SEQ ID NO: 170453 - DNA, 17 bp, Arabidopsis thaliana
aacgctgttttgcaaaa

SEQ ID NO: 170454 - DNA, 17 bp, Arabidopsis thaliana
aacggaatattgttgta

SEQ ID NO: 170455 - DNA, 17 bp, Arabidopsis thaliana
aacggaatattgttgtg

SEQ ID NO: 170456 - DNA, 17 bp, Arabidopsis thaliana
aacggaggcgtgcaaag

SEQ ID NO: 170457 - DNA, 17 bp, Arabidopsis thaliana
aacggatcctcaaaatt

SEQ ID NO: 170458 - DNA, 17 bp, Arabidopsis thaliana
aacggcaacaatttttt

SEQ ID NO: 170459 - DNA, 17 bp, Arabidopsis thaliana
aacggcaatttggtatt

SEQ ID NO: 170460 - DNA, 17 bp, Arabidopsis thaliana
aacggcgaaagcactct

SEQ ID NO: 170461 - DNA, 17 bp, Arabidopsis thaliana
aacggcgggagtaacta

SEQ ID NO: 170462 - DNA, 17 bp, Arabidopsis thaliana
aacggctaccacatcca

SEQ ID NO: 170463 - DNA, 17 bp, Arabidopsis thaliana
aacggctggcattcgcc

SEQ ID NO: 170464 - DNA, 17 bp, Arabidopsis thaliana
aacggctgtagctagat

SEQ ID NO: 170465 - DNA, 17 bp, Arabidopsis thaliana
aacggtcactcgacgtt

SEQ ID NO: 170466 - DNA, 17 bp, Arabidopsis thaliana
aacggtcgagatgacta

SEQ ID NO: 170467 - DNA, 17 bp, Arabidopsis thaliana
aacgtaaaactacgatt

SEQ ID NO: 170468 - DNA, 17 bp, Arabidopsis thaliana
aacgtacagcgctttat

SEQ ID NO: 170469 - DNA, 17 bp, Arabidopsis thaliana
aacgtcagcaggtttta

SEQ ID NO: 170470 - DNA, 17 bp, Arabidopsis thaliana
aacgtcctcggtccacg

SEQ ID NO: 170471 - DNA, 17 bp, Arabidopsis thaliana
aacgtccttcgcgggca

SEQ ID NO: 170472 - DNA, 17 bp, Arabidopsis thaliana
aacgtccttcgcgggcg

SEQ ID NO: 170473 - DNA, 17 bp, Arabidopsis thaliana
aacgtctcggtcctcac

SEQ ID NO: 170474 - DNA, 17 bp, Arabidopsis thaliana
aacgtgaatgatgcact

SEQ ID NO: 170475 - DNA, 17 bp, Arabidopsis thaliana
aacgtgcagaggacaga

SEQ ID NO: 170476 - DNA, 17 bp, Arabidopsis thaliana
aacgttcggcgtatgag

SEQ ID NO: 170477 - DNA, 17 bp, Arabidopsis thaliana
aacgttctgtcaatcgg

SEQ ID NO: 170478 - DNA, 17 bp, Arabidopsis thaliana
aacgttgtttaccgtaa

SEQ ID NO: 170479 - DNA, 17 bp, Arabidopsis thaliana
aacgtttactatgctgc

SEQ ID NO: 170480 - DNA, 17 bp, Arabidopsis thaliana
aacgtttctatactttg

SEQ ID NO: 170481 - DNA, 17 bp, Arabidopsis thaliana
aactaaccagatcaact

SEQ ID NO: 170482 - DNA, 17 bp, Arabidopsis thaliana
aactaagagatccattc

SEQ ID NO: 170483 - DNA, 17 bp, Arabidopsis thaliana
aactaataagccttgca

SEQ ID NO: 170484 - DNA, 17 bp, Arabidopsis thaliana
aactaatgtcacgattc

SEQ ID NO: 170485 - DNA, 17 bp, Arabidopsis thaliana
aactactactcggataa

SEQ ID NO: 170486 - DNA, 17 bp, Arabidopsis thaliana
aactagtactcaggtgg

SEQ ID NO: 170487 - DNA, 17 bp, Arabidopsis thaliana
aactataaaaattcaaa

SEQ ID NO: 170488 - DNA, 17 bp, Arabidopsis thaliana
aactatgacaccatcgg

SEQ ID NO: 170489 - DNA, 17 bp, Arabidopsis thaliana
aactatgactattcatg

SEQ ID NO: 170490 - DNA, 17 bp, Arabidopsis thaliana
aactatgataaacaaag

SEQ ID NO: 170491 - DNA, 17 bp, Arabidopsis thaliana
aactatgcctgagcggg

SEQ ID NO: 170492 - DNA, 17 bp, Arabidopsis thaliana
aactcaaacatgtgctt

SEQ ID NO: 170493 - DNA, 17 bp, Arabidopsis thaliana
aactcaaccgcttctcc

SEQ ID NO: 170494 - DNA, 17 bp, Arabidopsis thaliana
aactcaccaggtccaga

SEQ ID NO: 170495 - DNA, 17 bp, Arabidopsis thaliana
aactcacgggtactaaa

SEQ ID NO: 170496 - DNA, 17 bp, Arabidopsis thaliana
aactcatctcaagtgct

SEQ ID NO: 170497 - DNA, 17 bp, Arabidopsis thaliana
aactccaatctgtcctt

SEQ ID NO: 170498 - DNA, 17 bp, Arabidopsis thaliana
aactcccagtggtaggt

SEQ ID NO: 170499 - DNA, 17 bp, Arabidopsis thaliana
aactcctctgtggctgg

SEQ ID NO: 170500 - DNA, 17 bp, Arabidopsis thaliana
aactcgacggatcgatc

SEQ ID NO: 170501 - DNA, 17 bp, Arabidopsis thaliana
aactctcctaggtctgc

SEQ ID NO: 170502 - DNA, 17 bp, Arabidopsis thaliana
aactctgcggtcagcca

SEQ ID NO: 170503 - DNA, 17 bp, Arabidopsis thaliana
aactctggctaatctcg

SEQ ID NO: 170504 - DNA, 17 bp, Arabidopsis thaliana
aactcttgcgggagaaa

SEQ ID NO: 170505 - DNA, 17 bp, Arabidopsis thaliana
aactcttgcgggagaag

SEQ ID NO: 170506 - DNA, 17 bp, Arabidopsis thaliana
aactcttgttgatcgga

SEQ ID NO: 170507 - DNA, 17 bp, Arabidopsis thaliana
aactgaatgccctatta

SEQ ID NO: 170508 - DNA, 17 bp, Arabidopsis thaliana
aactgaatttagatttt

SEQ ID NO: 170509 - DNA, 17 bp, Arabidopsis thaliana
aactgacacatggctgg

SEQ ID NO: 170510 - DNA, 17 bp, Arabidopsis thaliana
aactgagctaaggtcgg

SEQ ID NO: 170511 - DNA, 17 bp, Arabidopsis thaliana
aactgatacttccccgg

SEQ ID NO: 170512 - DNA, 17 bp, Arabidopsis thaliana
aactgcgaatggctcat

SEQ ID NO: 170513 - DNA, 17 bp, Arabidopsis thaliana
aactgcgtggtaactgg

SEQ ID NO: 170514 - DNA, 17 bp, Arabidopsis thaliana
aactgctacaaattcaa

SEQ ID NO: 170515 - DNA, 17 bp, Arabidopsis thaliana
aactggaccaaaagcta

SEQ ID NO: 170516 - DNA, 17 bp, Arabidopsis thaliana
aactggagcggccactg

SEQ ID NO: 170517 - DNA, 17 bp, Arabidopsis thaliana
aactggtattcatattg

SEQ ID NO: 170518 - DNA, 17 bp, Arabidopsis thaliana
aactgtcacgactgcga

SEQ ID NO: 170519 - DNA, 17 bp, Arabidopsis thaliana
aactgtgatccgtccac

SEQ ID NO: 170520 - DNA, 17 bp, Arabidopsis thaliana
aactgttctttagacga

SEQ ID NO: 170521 - DNA, 17 bp, Arabidopsis thaliana
aactgtttagtgaccca

SEQ ID NO: 170522 - DNA, 17 bp, Arabidopsis thaliana
aactgtttgcctctctc

SEQ ID NO: 170523 - DNA, 17 bp, Arabidopsis thaliana
aacttagcaaaagatga

SEQ ID NO: 170524 - DNA, 17 bp, Arabidopsis thaliana
aacttagtcgcatcctg

SEQ ID NO: 170525 - DNA, 17 bp, Arabidopsis thaliana
aacttatgagggagctg

SEQ ID NO: 170526 - DNA, 17 bp, Arabidopsis thaliana
aacttattggccttttg

SEQ ID NO: 170527 - DNA, 17 bp, Arabidopsis thaliana
aacttcatcaccagatc

SEQ ID NO: 170528 - DNA, 17 bp, Arabidopsis thaliana
aacttccttgagtccat

SEQ ID NO: 170529 - DNA, 17 bp, Arabidopsis thaliana
aacttcgggaaaaggaa

SEQ ID NO: 170530 - DNA, 17 bp, Arabidopsis thaliana
aacttcgggaaaaggat

SEQ ID NO: 170531 - DNA, 17 bp, Arabidopsis thaliana
aacttcgggaactcaac

SEQ ID NO: 170532 - DNA, 17 bp, Arabidopsis thaliana
aacttctcggttgatgt

SEQ ID NO: 170533 - DNA, 17 bp, Arabidopsis thaliana
aacttgaaaagacaaga

SEQ ID NO: 170534 - DNA, 17 bp, Arabidopsis thaliana
aacttgaaaagacaagg

SEQ ID NO: 170535 - DNA, 17 bp, Arabidopsis thaliana
aacttgacttgaaagag

SEQ ID NO: 170536 - DNA, 17 bp, Arabidopsis thaliana
aacttgatcgctcaaag

SEQ ID NO: 170537 - DNA, 17 bp, Arabidopsis thaliana
aacttgattcgtcaccg

SEQ ID NO: 170538 - DNA, 17 bp, Arabidopsis thaliana
aacttgccgatccatct

SEQ ID NO: 170539 - DNA, 17 bp, Arabidopsis thaliana
aacttgcgatccatctg

SEQ ID NO: 170540 - DNA, 17 bp, Arabidopsis thaliana
aacttgcgttcaaagaa

SEQ ID NO: 170541 - DNA, 17 bp, Arabidopsis thaliana
aacttgttgaactcagt

SEQ ID NO: 170542 - DNA, 17 bp, Arabidopsis thaliana
aacttgttgataattat

SEQ ID NO: 170543 - DNA, 17 bp, Arabidopsis thaliana
aacttgttgggtcgtta

SEQ ID NO: 170544 - DNA, 17 bp, Arabidopsis thaliana
aactttcatctaccttt

SEQ ID NO: 170545 - DNA, 17 bp, Arabidopsis thaliana
aactttcctcatattga

SEQ ID NO: 170546 - DNA, 17 bp, Arabidopsis thaliana
aactttgaaggccgaag

SEQ ID NO: 170547 - DNA, 17 bp, Arabidopsis thaliana
aacttttcccacaaact

SEQ ID NO: 170548 - DNA, 17 bp, Arabidopsis thaliana
aacttttttgtagacgt

SEQ ID NO: 170549 - DNA, 17 bp, Arabidopsis thaliana
aagaaaaatcttctgat

SEQ ID NO: 170550 - DNA, 17 bp, Arabidopsis thaliana
aagaaaactttctggag

SEQ ID NO: 170551 - DNA, 17 bp, Arabidopsis thaliana
aagaaaaggccttacaa

SEQ ID NO: 170552 - DNA, 17 bp, Arabidopsis thaliana
aagaaaccggcccaccg

SEQ ID NO: 170553 - DNA, 17 bp, Arabidopsis thaliana
aagaaacggtatcagga

SEQ ID NO: 170554 - DNA, 17 bp, Arabidopsis thaliana
aagaaactgtcacaaca

SEQ ID NO: 170555 - DNA, 17 bp, Arabidopsis thaliana
aagaaactgtcacaacc

SEQ ID NO: 170556 - DNA, 17 bp, Arabidopsis thaliana
aagaaagccgtggaaga

SEQ ID NO: 170557 - DNA, 17 bp, Arabidopsis thaliana
aagaaagctgtggaaca

SEQ ID NO: 170558 - DNA, 17 bp, Arabidopsis thaliana
aagaaagctgtggaaga

SEQ ID NO: 170559 - DNA, 17 bp, Arabidopsis thaliana
aagaaagctgtggaagc

SEQ ID NO: 170560 - DNA, 17 bp, Arabidopsis thaliana
aagaaagctgtggaagt

SEQ ID NO: 170561 - DNA, 17 bp, Arabidopsis thaliana
aagaaagtaacaacata

SEQ ID NO: 170562 - DNA, 17 bp, Arabidopsis thaliana
aagaaatgtaagcttta

SEQ ID NO: 170563 - DNA, 17 bp, Arabidopsis thaliana
aagaacaggcgaaccga

SEQ ID NO: 170564 - DNA, 17 bp, Arabidopsis thaliana
aagaacgtagcgaaata

SEQ ID NO: 170565 - DNA, 17 bp, Arabidopsis thaliana
aagaagacagaaaagaa

SEQ ID NO: 170566 - DNA, 17 bp, Arabidopsis thaliana
aagaagattgattctga

SEQ ID NO: 170567 - DNA, 17 bp, Arabidopsis thaliana
aagaagcggcgaccggt

SEQ ID NO: 170568 - DNA, 17 bp, Arabidopsis thaliana
aagaaggaacaaaataa

SEQ ID NO: 170569 - DNA, 17 bp, Arabidopsis thaliana
aagaagtagaagaaaag

SEQ ID NO: 170570 - DNA, 17 bp, Arabidopsis thaliana
aagaagtcgtataggtc

SEQ ID NO: 170571 - DNA, 17 bp, Arabidopsis thaliana
aagaagtgtgatgaggt

SEQ ID NO: 170572 - DNA, 17 bp, Arabidopsis thaliana
aagaatacgcatgtata

SEQ ID NO: 170573 - DNA, 17 bp, Arabidopsis thaliana
aagaatcgcgaccttca

SEQ ID NO: 170574 - DNA, 17 bp, Arabidopsis thaliana
aagaatcttgatgatgc

SEQ ID NO: 170575 - DNA, 17 bp, Arabidopsis thaliana
aagacaaacgacgctgc

SEQ ID NO: 170576 - DNA, 17 bp, Arabidopsis thaliana
aagacattggacatatt

SEQ ID NO: 170577 - DNA, 17 bp, Arabidopsis thaliana
aagacattgtcaggtgg

SEQ ID NO: 170578 - DNA, 17 bp, Arabidopsis thaliana
aagaccaagttgttctg

SEQ ID NO: 170579 - DNA, 17 bp, Arabidopsis thaliana
aagaccagctttgtttt

SEQ ID NO: 170580 - DNA, 17 bp, Arabidopsis thaliana
aagaccaggagcgtatc

SEQ ID NO: 170581 - DNA, 17 bp, Arabidopsis thaliana
aagaccgctaacgatgc

SEQ ID NO: 170582 - DNA, 17 bp, Arabidopsis thaliana
aagacctatgtttctac

SEQ ID NO: 170583 - DNA, 17 bp, Arabidopsis thaliana
aagacgatgtggtccgg

SEQ ID NO: 170584 - DNA, 17 bp, Arabidopsis thaliana
aagacttacccgtcgag

SEQ ID NO: 170585 - DNA, 17 bp, Arabidopsis thaliana
aagagaaggtttctgtt

SEQ ID NO: 170586 - DNA, 17 bp, Arabidopsis thaliana
aagagactttttttgta

SEQ ID NO: 170587 - DNA, 17 bp, Arabidopsis thaliana
aagagagggatagtgaa

SEQ ID NO: 170588 - DNA, 17 bp, Arabidopsis thaliana
aagagccgtcaactgcc

SEQ ID NO: 170589 - DNA, 17 bp, Arabidopsis thaliana
aagaggaagataggacg

SEQ ID NO: 170590 - DNA, 17 bp, Arabidopsis thaliana
aagaggagccgtcttag

SEQ ID NO: 170591 - DNA, 17 bp, Arabidopsis thaliana
aagaggagggacggtcc

SEQ ID NO: 170592 - DNA, 17 bp, Arabidopsis thaliana
aagagtaagatggatct

SEQ ID NO: 170593 - DNA, 17 bp, Arabidopsis thaliana
aagagtgcttgaaattg

SEQ ID NO: 170594 - DNA, 17 bp, Arabidopsis thaliana
aagagttgcagccaaaa

SEQ ID NO: 170595 - DNA, 17 bp, Arabidopsis thaliana
aagagttgcatctacca

SEQ ID NO: 170596 - DNA, 17 bp, Arabidopsis thaliana
aagagtttgatcctggc

SEQ ID NO: 170597 - DNA, 17 bp, Arabidopsis thaliana
aagataatcgccttagt

SEQ ID NO: 170598 - DNA, 17 bp, Arabidopsis thaliana
aagatcaccttccaggc

SEQ ID NO: 170599 - DNA, 17 bp, Arabidopsis thaliana
aagatcttgaggttgta

SEQ ID NO: 170600 - DNA, 17 bp, Arabidopsis thaliana
aagatcttgatgatgct

SEQ ID NO: 170601 - DNA, 17 bp, Arabidopsis thaliana
aagatgcatacagattg

SEQ ID NO: 170602 - DNA, 17 bp, Arabidopsis thaliana
aagatggatcttgataa

SEQ ID NO: 170603 - DNA, 17 bp, Arabidopsis thaliana
aagattagatgttctgg

SEQ ID NO: 170604 - DNA, 17 bp, Arabidopsis thaliana
aagatttttcgtgattt

SEQ ID NO: 170605 - DNA, 17 bp, Arabidopsis thaliana
aagcacaggagggatag

SEQ ID NO: 170606 - DNA, 17 bp, Arabidopsis thaliana
aagcagaacctctgacc

SEQ ID NO: 170607 - DNA, 17 bp, Arabidopsis thaliana
aagcagaactggcgatg

SEQ ID NO: 170608 - DNA, 17 bp, Arabidopsis thaliana
aagcagaattcaccaag

SEQ ID NO: 170609 - DNA, 17 bp, Arabidopsis thaliana
aagcagagattatgaac

SEQ ID NO: 170610 - DNA, 17 bp, Arabidopsis thaliana
aagcagcagatctacgg

SEQ ID NO: 170611 - DNA, 17 bp, Arabidopsis thaliana
aagcaggtccaggcatt

SEQ ID NO: 170612 - DNA, 17 bp, Arabidopsis thaliana
aagcagtccacagatcc

SEQ ID NO: 170613 - DNA, 17 bp, Arabidopsis thaliana
aagcagtggctttagta

SEQ ID NO: 170614 - DNA, 17 bp, Arabidopsis thaliana
aagcagtggctttagtt

SEQ ID NO: 170615 - DNA, 17 bp, Arabidopsis thaliana
aagcatattgatgtgcg

SEQ ID NO: 170616 - DNA, 17 bp, Arabidopsis thaliana
aagcattccttattttg

SEQ ID NO: 170617 - DNA, 17 bp, Arabidopsis thaliana
aagcattgcgatggtcc

SEQ ID NO: 170618 - DNA, 17 bp, Arabidopsis thaliana
aagcatttgccaaggaa

SEQ ID NO: 170619 - DNA, 17 bp, Arabidopsis thaliana
aagcatttgccaaggat

SEQ ID NO: 170620 - DNA, 17 bp, Arabidopsis thaliana
aagcccaggagggatag

SEQ ID NO: 170621 - DNA, 17 bp, Arabidopsis thaliana
aagcccgttcccttggc

SEQ ID NO: 170622 - DNA, 17 bp, Arabidopsis thaliana
aagccctccttcgccca

SEQ ID NO: 170623 - DNA, 17 bp, Arabidopsis thaliana
aagccgaccaatgcaca

SEQ ID NO: 170624 - DNA, 17 bp, Arabidopsis thaliana
aagccgagtcgacctcc

SEQ ID NO: 170625 - DNA, 17 bp, Arabidopsis thaliana
aagcctaagtagtgttt

SEQ ID NO: 170626 - DNA, 17 bp, Arabidopsis thaliana
aagcctatggggtcgct

SEQ ID NO: 170627 - DNA, 17 bp, Arabidopsis thaliana
aagccttctggccgagg

SEQ ID NO: 170628 - DNA, 17 bp, Arabidopsis thaliana
aagccttgatgattcga

SEQ ID NO: 170629 - DNA, 17 bp, Arabidopsis thaliana
aagccttgtactgagct

SEQ ID NO: 170630 - DNA, 17 bp, Arabidopsis thaliana
aagcgaaggcttggctc

SEQ ID NO: 170631 - DNA, 17 bp, Arabidopsis thaliana
aagcgaatgatgataca

SEQ ID NO: 170632 - DNA, 17 bp, Arabidopsis thaliana
aagcgaatgatgatact

SEQ ID NO: 170633 - DNA, 17 bp, Arabidopsis thaliana
aagcgacatcttgcccg

SEQ ID NO: 170634 - DNA, 17 bp, Arabidopsis thaliana
aagcgcaagttatcagc

SEQ ID NO: 170635 - DNA, 17 bp, Arabidopsis thaliana
aagcgcaggagggatag

SEQ ID NO: 170636 - DNA, 17 bp, Arabidopsis thaliana
aagcggatgaattttac

SEQ ID NO: 170637 - DNA, 17 bp, Arabidopsis thaliana
aagcggcgattgcacca

SEQ ID NO: 170638 - DNA, 17 bp, Arabidopsis thaliana
aagcgtcctcagcgacg

SEQ ID NO: 170639 - DNA, 17 bp, Arabidopsis thaliana
aagcgtcgtgctgctag

SEQ ID NO: 170640 - DNA, 17 bp, Arabidopsis thaliana
aagcgtcgttcggaccg

SEQ ID NO: 170641 - DNA, 17 bp, Arabidopsis thaliana
aagcgtggcctatcgat

SEQ ID NO: 170642 - DNA, 17 bp, Arabidopsis thaliana
aagctaaagcgggaatg

SEQ ID NO: 170643 - DNA, 17 bp, Arabidopsis thaliana
aagctaaggagggatcg

SEQ ID NO: 170644 - DNA, 17 bp, Arabidopsis thaliana
aagctaccgtgcgctgg

SEQ ID NO: 170645 - DNA, 17 bp, Arabidopsis thaliana
aagctcaagagggatag

SEQ ID NO: 170646 - DNA, 17 bp, Arabidopsis thaliana
aagctcaggaaggatag

SEQ ID NO: 170647 - DNA, 17 bp, Arabidopsis thaliana
aagctcaggacggatag

SEQ ID NO: 170648 - DNA, 17 bp, Arabidopsis thaliana
aagctcaggagagataa

SEQ ID NO: 170649 - DNA, 17 bp, Arabidopsis thaliana
aagctcaggagagatag

SEQ ID NO: 170650 - DNA, 17 bp, Arabidopsis thaliana
aagctcaggagcgataa

SEQ ID NO: 170651 - DNA, 17 bp, Arabidopsis thaliana
aagctcaggagcgatag

SEQ ID NO: 170652 - DNA, 17 bp, Arabidopsis thaliana
aagctcaggaggaataa

SEQ ID NO: 170653 - DNA, 17 bp, Arabidopsis thaliana
aagctcaggaggaatag

SEQ ID NO: 170654 - DNA, 17 bp, Arabidopsis thaliana
aagctcaggaggagcgc

SEQ ID NO: 170655 - DNA, 17 bp, Arabidopsis thaliana
aagctcaggaggcatag

SEQ ID NO: 170656 - DNA, 17 bp, Arabidopsis thaliana
aagctcaggagggaaag

SEQ ID NO: 170657 - DNA, 17 bp, Arabidopsis thaliana
aagctcaggagggacag

SEQ ID NO: 170658 - DNA, 17 bp, Arabidopsis thaliana
aagctcaggagggaccg

SEQ ID NO: 170659 - DNA, 17 bp, Arabidopsis thaliana
aagctcaggagggataa

SEQ ID NO: 170660 - DNA, 17 bp, Arabidopsis thaliana
aagctcaggagggatag

SEQ ID NO: 170661 - DNA, 17 bp, Arabidopsis thaliana
aagctcaggagggatat

SEQ ID NO: 170662 - DNA, 17 bp, Arabidopsis thaliana
aagctcaggagggatcg

SEQ ID NO: 170663 - DNA, 17 bp, Arabidopsis thaliana
aagctcaggagggatgg

SEQ ID NO: 170664 - DNA, 17 bp, Arabidopsis thaliana
aagctcaggaggggtag

SEQ ID NO: 170665 - DNA, 17 bp, Arabidopsis thaliana
aagctcaggagggtaga

SEQ ID NO: 170666 - DNA, 17 bp, Arabidopsis thaliana
aagctcaggagggttag

SEQ ID NO: 170667 - DNA, 17 bp, Arabidopsis thaliana
aagctcaggaggtatag

SEQ ID NO: 170668 - DNA, 17 bp, Arabidopsis thaliana
aagctcaggagtgataa

SEQ ID NO: 170669 - DNA, 17 bp, Arabidopsis thaliana
aagctcaggagtgatag

SEQ ID NO: 170670 - DNA, 17 bp, Arabidopsis thaliana
aagctcaggatggataa

SEQ ID NO: 170671 - DNA, 17 bp, Arabidopsis thaliana
aagctcaggatggatag

SEQ ID NO: 170672 - DNA, 17 bp, Arabidopsis thaliana
aagctcagggatagcga

SEQ ID NO: 170673 - DNA, 17 bp, Arabidopsis thaliana
aagctcagggatagcgc

SEQ ID NO: 170674 - DNA, 17 bp, Arabidopsis thaliana
aagctcaggggggatag

SEQ ID NO: 170675 - DNA, 17 bp, Arabidopsis thaliana
aagctcaggtgggatag

SEQ ID NO: 170676 - DNA, 17 bp, Arabidopsis thaliana
aagctcagtagggatag

SEQ ID NO: 170677 - DNA, 17 bp, Arabidopsis thaliana
aagctcatgagggatag

SEQ ID NO: 170678 - DNA, 17 bp, Arabidopsis thaliana
aagctcctactgaggga

SEQ ID NO: 170679 - DNA, 17 bp, Arabidopsis thaliana
aagctcctactgagggt

SEQ ID NO: 170680 - DNA, 17 bp, Arabidopsis thaliana
aagctcgaacccttgga

SEQ ID NO: 170681 - DNA, 17 bp, Arabidopsis thaliana
aagctcgggagggatag

SEQ ID NO: 170682 - DNA, 17 bp, Arabidopsis thaliana
aagctctcgaggtgtac

SEQ ID NO: 170683 - DNA, 17 bp, Arabidopsis thaliana
aagctctcgtctttgcc

SEQ ID NO: 170684 - DNA, 17 bp, Arabidopsis thaliana
aagctctggagggatag

SEQ ID NO: 170685 - DNA, 17 bp, Arabidopsis thaliana
aagctgattcacgtatg

SEQ ID NO: 170686 - DNA, 17 bp, Arabidopsis thaliana
aagctgcgaaaatagag

SEQ ID NO: 170687 - DNA, 17 bp, Arabidopsis thaliana
aagctggcagcttcaga

SEQ ID NO: 170688 - DNA, 17 bp, Arabidopsis thaliana
aagctgtgagtaagacg

SEQ ID NO: 170689 - DNA, 17 bp, Arabidopsis thaliana
aagcttaggagggatag

SEQ ID NO: 170690 - DNA, 17 bp, Arabidopsis thaliana
aagcttattaaactaaa

SEQ ID NO: 170691 - DNA, 17 bp, Arabidopsis thaliana
aagcttcagaagcagtg

SEQ ID NO: 170692 - DNA, 17 bp, Arabidopsis thaliana
aagcttcagtgtggacg

SEQ ID NO: 170693 - DNA, 17 bp, Arabidopsis thaliana
aagcttcgttccaaagt

SEQ ID NO: 170694 - DNA, 17 bp, Arabidopsis thaliana
aagcttctcggtagcgt

SEQ ID NO: 170695 - DNA, 17 bp, Arabidopsis thaliana
aagcttggcttgacaca

SEQ ID NO: 170696 - DNA, 17 bp, Arabidopsis thaliana
aagcttgggtgaaacta

SEQ ID NO: 170697 - DNA, 17 bp, Arabidopsis thaliana
aagcttgtagaggctga

SEQ ID NO: 170698 - DNA, 17 bp, Arabidopsis thaliana
aagctttcagggcaacg

SEQ ID NO: 170699 - DNA, 17 bp, Arabidopsis thaliana
aagctttgatttgaacc

SEQ ID NO: 170700 - DNA, 17 bp, Arabidopsis thaliana
aagctttgctcgttcat

SEQ ID NO: 170701 - DNA, 17 bp, Arabidopsis thaliana
aagctttgctcgttcgt

SEQ ID NO: 170702 - DNA, 17 bp, Arabidopsis thaliana
aagctttgctcgttgtt

SEQ ID NO: 170703 - DNA, 17 bp, Arabidopsis thaliana
aaggaaaaccccattca

SEQ ID NO: 170704 - DNA, 17 bp, Arabidopsis thaliana
aaggaaaatgattacca

SEQ ID NO: 170705 - DNA, 17 bp, Arabidopsis thaliana
aaggaagctataagtaa

SEQ ID NO: 170706 - DNA, 17 bp, Arabidopsis thaliana
aaggaaggcagcaggca

SEQ ID NO: 170707 - DNA, 17 bp, Arabidopsis thaliana
aaggaatacttctgatt

SEQ ID NO: 170708 - DNA, 17 bp, Arabidopsis thaliana
aaggaatgcctggaaca

SEQ ID NO: 170709 - DNA, 17 bp, Arabidopsis thaliana
aaggaatgcttctgatt

SEQ ID NO: 170710 - DNA, 17 bp, Arabidopsis thaliana
aaggaattgacggaagg

SEQ ID NO: 170711 - DNA, 17 bp, Arabidopsis thaliana
aaggaattgttgagttt

SEQ ID NO: 170712 - DNA, 17 bp, Arabidopsis thaliana
aaggacagattggagga

SEQ ID NO: 170713 - DNA, 17 bp, Arabidopsis thaliana
aaggacagattggagta

SEQ ID NO: 170714 - DNA, 17 bp, Arabidopsis thaliana
aaggacctttccctccg

SEQ ID NO: 170715 - DNA, 17 bp, Arabidopsis thaliana
aaggacgaataatttaa

SEQ ID NO: 170716 - DNA, 17 bp, Arabidopsis thaliana
aaggacgaggtcttgac

SEQ ID NO: 170717 - DNA, 17 bp, Arabidopsis thaliana
aaggagacgatcttgaa

SEQ ID NO: 170718 - DNA, 17 bp, Arabidopsis thaliana
aaggataggtggtagga

SEQ ID NO: 170719 - DNA, 17 bp, Arabidopsis thaliana
aaggattacgaactttg

SEQ ID NO: 170720 - DNA, 17 bp, Arabidopsis thaliana
aaggattccgacttaga

SEQ ID NO: 170721 - DNA, 17 bp, Arabidopsis thaliana
aaggattctacccgccg

SEQ ID NO: 170722 - DNA, 17 bp, Arabidopsis thaliana
aaggattctcagataca

SEQ ID NO: 170723 - DNA, 17 bp, Arabidopsis thaliana
aaggattctcagatact

SEQ ID NO: 170724 - DNA, 17 bp, Arabidopsis thaliana
aaggattggctctgagg

SEQ ID NO: 170725 - DNA, 17 bp, Arabidopsis thaliana
aaggcacgtgtcgttgg

SEQ ID NO: 170726 - DNA, 17 bp, Arabidopsis thaliana
aaggcatcttatgaggg

SEQ ID NO: 170727 - DNA, 17 bp, Arabidopsis thaliana
aaggccaacatcagtaa

SEQ ID NO: 170728 - DNA, 17 bp, Arabidopsis thaliana
aaggccaataagttcta

SEQ ID NO: 170729 - DNA, 17 bp, Arabidopsis thaliana
aaggccactctgccact

SEQ ID NO: 170730 - DNA, 17 bp, Arabidopsis thaliana
aaggccccgaggagaca

SEQ ID NO: 170731 - DNA, 17 bp, Arabidopsis thaliana
aaggcctggctcttgcc

SEQ ID NO: 170732 - DNA, 17 bp, Arabidopsis thaliana
aaggcgaaagaacagtt

SEQ ID NO: 170733 - DNA, 17 bp, Arabidopsis thaliana
aaggcggtccgaacgac

SEQ ID NO: 170734 - DNA, 17 bp, Arabidopsis thaliana
aaggctaatgttgtgat

SEQ ID NO: 170735 - DNA, 17 bp, Arabidopsis thaliana
aaggctcgggtctcatg

SEQ ID NO: 170736 - DNA, 17 bp, Arabidopsis thaliana
aaggcttcaaggatttg

SEQ ID NO: 170737 - DNA, 17 bp, Arabidopsis thaliana
aagggaaagagatttgc

SEQ ID NO: 170738 - DNA, 17 bp, Arabidopsis thaliana
aagggaaatcaaccgag

SEQ ID NO: 170739 - DNA, 17 bp, Arabidopsis thaliana
aagggaacgggcttggc

SEQ ID NO: 170740 - DNA, 17 bp, Arabidopsis thaliana
aagggatcctatcacca

SEQ ID NO: 170741 - DNA, 17 bp, Arabidopsis thaliana
aagggctgaatctcagt

SEQ ID NO: 170742 - DNA, 17 bp, Arabidopsis thaliana
aaggggaatctgactga

SEQ ID NO: 170743 - DNA, 17 bp, Arabidopsis thaliana
aaggggaatctgactgt

SEQ ID NO: 170744 - DNA, 17 bp, Arabidopsis thaliana
aaggggtgtgggaacga

SEQ ID NO: 170745 - DNA, 17 bp, Arabidopsis thaliana
aagggtcatctagcggc

SEQ ID NO: 170746 - DNA, 17 bp, Arabidopsis thaliana
aagggtcgaatcttagc

SEQ ID NO: 170747 - DNA, 17 bp, Arabidopsis thaliana
aagggttcgagctttcc

SEQ ID NO: 170748 - DNA, 17 bp, Arabidopsis thaliana
aagggttgtcgatagtt

SEQ ID NO: 170749 - DNA, 17 bp, Arabidopsis thaliana
aaggtagatttgatgca

SEQ ID NO: 170750 - DNA, 17 bp, Arabidopsis thaliana
aaggtaggacgtgtcgg

SEQ ID NO: 170751 - DNA, 17 bp, Arabidopsis thaliana
aaggtatactttgttac

SEQ ID NO: 170752 - DNA, 17 bp, Arabidopsis thaliana
aaggtcaactttaattc

SEQ ID NO: 170753 - DNA, 17 bp, Arabidopsis thaliana
aaggtcgacgcgggctc

SEQ ID NO: 170754 - DNA, 17 bp, Arabidopsis thaliana
aaggtcgcgaattttcc

SEQ ID NO: 170755 - DNA, 17 bp, Arabidopsis thaliana
aaggtcgcgattcttcc

SEQ ID NO: 170756 - DNA, 17 bp, Arabidopsis thaliana
aaggtctccgttggtga

SEQ ID NO: 170757 - DNA, 17 bp, Arabidopsis thaliana
aaggtctgccgtcttgc

SEQ ID NO: 170758 - DNA, 17 bp, Arabidopsis thaliana
aaggtcttacaaggtca

SEQ ID NO: 170759 - DNA, 17 bp, Arabidopsis thaliana
aaggtgacaggattcga

SEQ ID NO: 170760 - DNA, 17 bp, Arabidopsis thaliana
aaggtgatgaacgaaat

SEQ ID NO: 170761 - DNA, 17 bp, Arabidopsis thaliana
aaggtgcggctggatca

SEQ ID NO: 170762 - DNA, 17 bp, Arabidopsis thaliana
aaggtggggggggggga

SEQ ID NO: 170763 - DNA, 17 bp, Arabidopsis thaliana
aaggttcttccgtcaaa

SEQ ID NO: 170764 - DNA, 17 bp, Arabidopsis thaliana
aaggttgtcaacaagaa

SEQ ID NO: 170765 - DNA, 17 bp, Arabidopsis thaliana
aaggttgtcaacaagat

SEQ ID NO: 170766 - DNA, 17 bp, Arabidopsis thaliana
aaggttgtcaaccagat

SEQ ID NO: 170767 - DNA, 17 bp, Arabidopsis thaliana
aagtaaatgagatttta

SEQ ID NO: 170768 - DNA, 17 bp, Arabidopsis thaliana
aagtaaatgagattttc

SEQ ID NO: 170769 - DNA, 17 bp, Arabidopsis thaliana
aagtaaatgtttatcta

SEQ ID NO: 170770 - DNA, 17 bp, Arabidopsis thaliana
aagtaacactcggtggc

SEQ ID NO: 170771 - DNA, 17 bp, Arabidopsis thaliana
aagtaactgtattagca

SEQ ID NO: 170772 - DNA, 17 bp, Arabidopsis thaliana
aagtacatgaggtttca

SEQ ID NO: 170773 - DNA, 17 bp, Arabidopsis thaliana
aagtactgatgatgcaa

SEQ ID NO: 170774 - DNA, 17 bp, Arabidopsis thaliana
aagtactgatgatgcta

SEQ ID NO: 170775 - DNA, 17 bp, Arabidopsis thaliana
aagtactgatgatgctc

SEQ ID NO: 170776 - DNA, 17 bp, Arabidopsis thaliana
aagtactgatgatgctg

SEQ ID NO: 170777 - DNA, 17 bp, Arabidopsis thaliana
aagtagatgatgcttct

SEQ ID NO: 170778 - DNA, 17 bp, Arabidopsis thaliana
aagtagccagcgtgtta

SEQ ID NO: 170779 - DNA, 17 bp, Arabidopsis thaliana
aagtagccagcgtgttg

SEQ ID NO: 170780 - DNA, 17 bp, Arabidopsis thaliana
aagtagtgtctctctca

SEQ ID NO: 170781 - DNA, 17 bp, Arabidopsis thaliana
aagtatccagggtatta

SEQ ID NO: 170782 - DNA, 17 bp, Arabidopsis thaliana
aagtatccagggtattc

SEQ ID NO: 170783 - DNA, 17 bp, Arabidopsis thaliana
aagtatggaaagagata

SEQ ID NO: 170784 - DNA, 17 bp, Arabidopsis thaliana
aagtattccagatggta

SEQ ID NO: 170785 - DNA, 17 bp, Arabidopsis thaliana
aagtattgaccaaaaaa

SEQ ID NO: 170786 - DNA, 17 bp, Arabidopsis thaliana
aagtcagaatccgggca

SEQ ID NO: 170787 - DNA, 17 bp, Arabidopsis thaliana
aagtcatcagcaaccga

SEQ ID NO: 170788 - DNA, 17 bp, Arabidopsis thaliana
aagtcattgtatttggg

SEQ ID NO: 170789 - DNA, 17 bp, Arabidopsis thaliana
aagtccaacatagcgta

SEQ ID NO: 170790 - DNA, 17 bp, Arabidopsis thaliana
aagtccactaaacctta

SEQ ID NO: 170791 - DNA, 17 bp, Arabidopsis thaliana
aagtccgttcggcggaa

SEQ ID NO: 170792 - DNA, 17 bp, Arabidopsis thaliana
aagtcctgaatccgata

SEQ ID NO: 170793 - DNA, 17 bp, Arabidopsis thaliana
aagtcggaatccgctaa

SEQ ID NO: 170794 - DNA, 17 bp, Arabidopsis thaliana
aagtcgtaacaaggttt

SEQ ID NO: 170795 - DNA, 17 bp, Arabidopsis thaliana
aagtcgtcctatctcag

SEQ ID NO: 170796 - DNA, 17 bp, Arabidopsis thaliana
aagtcgtcggaggaaga

SEQ ID NO: 170797 - DNA, 17 bp, Arabidopsis thaliana
aagtcgtctaaagaaca

SEQ ID NO: 170798 - DNA, 17 bp, Arabidopsis thaliana
aagtctaacatagcgta

SEQ ID NO: 170799 - DNA, 17 bp, Arabidopsis thaliana
aagtctaacatagcgtt

SEQ ID NO: 170800 - DNA, 17 bp, Arabidopsis thaliana
aagtctaggcctccgtt

SEQ ID NO: 170801 - DNA, 17 bp, Arabidopsis thaliana
aagtctattgggtgcaa

SEQ ID NO: 170802 - DNA, 17 bp, Arabidopsis thaliana
aagtctcttgtgaatta

SEQ ID NO: 170803 - DNA, 17 bp, Arabidopsis thaliana
aagtctcttgtggatta

SEQ ID NO: 170804 - DNA, 17 bp, Arabidopsis thaliana
aagtctgcggctactac

SEQ ID NO: 170805 - DNA, 17 bp, Arabidopsis thaliana
aagtctggtgccagcag

SEQ ID NO: 170806 - DNA, 17 bp, Arabidopsis thaliana
aagtgaagaaattcaac

SEQ ID NO: 170807 - DNA, 17 bp, Arabidopsis thaliana
aagtgactgtgttgcca

SEQ ID NO: 170808 - DNA, 17 bp, Arabidopsis thaliana
aagtgagaatgctgaca

SEQ ID NO: 170809 - DNA, 17 bp, Arabidopsis thaliana
aagtgaggacaggtaga

SEQ ID NO: 170810 - DNA, 17 bp, Arabidopsis thaliana
aagtgaggacaggtagt

SEQ ID NO: 170811 - DNA, 17 bp, Arabidopsis thaliana
aagtgatgacgccattg

SEQ ID NO: 170812 - DNA, 17 bp, Arabidopsis thaliana
aagtggcagagtggcct

SEQ ID NO: 170813 - DNA, 17 bp, Arabidopsis thaliana
aagtggtaacaggtagt

SEQ ID NO: 170814 - DNA, 17 bp, Arabidopsis thaliana
aagtggttcagctcagt

SEQ ID NO: 170815 - DNA, 17 bp, Arabidopsis thaliana
aagtgtcgtctttccac

SEQ ID NO: 170816 - DNA, 17 bp, Arabidopsis thaliana
aagtgtgtgaagttcat

SEQ ID NO: 170817 - DNA, 17 bp, Arabidopsis thaliana
aagtgttcggatcgcgg

SEQ ID NO: 170818 - DNA, 17 bp, Arabidopsis thaliana
aagtgttctaaggaagt

SEQ ID NO: 170819 - DNA, 17 bp, Arabidopsis thaliana
aagttaccacagggata

SEQ ID NO: 170820 - DNA, 17 bp, Arabidopsis thaliana
aagttacggcttgtgta

SEQ ID NO: 170821 - DNA, 17 bp, Arabidopsis thaliana
aagttcaacatgcggac

SEQ ID NO: 170822 - DNA, 17 bp, Arabidopsis thaliana
aagttcaggagggagag

SEQ ID NO: 170823 - DNA, 17 bp, Arabidopsis thaliana
aagttcaggagggatag

SEQ ID NO: 170824 - DNA, 17 bp, Arabidopsis thaliana
aagttcctgggcctgct

SEQ ID NO: 170825 - DNA, 17 bp, Arabidopsis thaliana
aagttcgcacttaagca

SEQ ID NO: 170826 - DNA, 17 bp, Arabidopsis thaliana
aagttctctcgtcaatg

SEQ ID NO: 170827 - DNA, 17 bp, Arabidopsis thaliana
aagttgacccctgttga

SEQ ID NO: 170828 - DNA, 17 bp, Arabidopsis thaliana
aagttgaccttggctct

SEQ ID NO: 170829 - DNA, 17 bp, Arabidopsis thaliana
aagttggccgcagtgtt

SEQ ID NO: 170830 - DNA, 17 bp, Arabidopsis thaliana
aagttgtccttggctac

SEQ ID NO: 170831 - DNA, 17 bp, Arabidopsis thaliana
aagttgtcgacggtgac

SEQ ID NO: 170832 - DNA, 17 bp, Arabidopsis thaliana
aagttgtctcttgtagt

SEQ ID NO: 170833 - DNA, 17 bp, Arabidopsis thaliana
aagttgtggatgtttgg

SEQ ID NO: 170834 - DNA, 17 bp, Arabidopsis thaliana
aagtttccctcaggata

SEQ ID NO: 170835 - DNA, 17 bp, Arabidopsis thaliana
aagtttgaggcaataaa

SEQ ID NO: 170836 - DNA, 17 bp, Arabidopsis thaliana
aagtttgaggcaataac

SEQ ID NO: 170837 - DNA, 17 bp, Arabidopsis thaliana
aagtttgtgggaaaaga

SEQ ID NO: 170838 - DNA, 17 bp, Arabidopsis thaliana
aagttttcgaaatttgg

SEQ ID NO: 170839 - DNA, 17 bp, Arabidopsis thaliana
aagtttttaatattcaa

SEQ ID NO: 170840 - DNA, 17 bp, Arabidopsis thaliana
aagtttttgacccaggt

SEQ ID NO: 170841 - DNA, 17 bp, Arabidopsis thaliana
aataaaagttaactcca

SEQ ID NO: 170842 - DNA, 17 bp, Arabidopsis thaliana
aataaatgagaaagtgt

SEQ ID NO: 170843 - DNA, 17 bp, Arabidopsis thaliana
aataacaggtctgtgaa

SEQ ID NO: 170844 - DNA, 17 bp, Arabidopsis thaliana
aataacaggtctgtgat

SEQ ID NO: 170845 - DNA, 17 bp, Arabidopsis thaliana
aataaggaatgcttcta

SEQ ID NO: 170846 - DNA, 17 bp, Arabidopsis thaliana
aataaggaatgcttctg

SEQ ID NO: 170847 - DNA, 17 bp, Arabidopsis thaliana
aataagtaaatgtttat

SEQ ID NO: 170848 - DNA, 17 bp, Arabidopsis thaliana
aataagtatccagggta

SEQ ID NO: 170849 - DNA, 17 bp, Arabidopsis thaliana
aataagtcaacagcaac

SEQ ID NO: 170850 - DNA, 17 bp, Arabidopsis thaliana
aataagttctctcgtca

SEQ ID NO: 170851 - DNA, 17 bp, Arabidopsis thaliana
aataatgaaatgcatca

SEQ ID NO: 170852 - DNA, 17 bp, Arabidopsis thaliana
aataatggtggagacca

SEQ ID NO: 170853 - DNA, 17 bp, Arabidopsis thaliana
aatacaaaaatgaagaa

SEQ ID NO: 170854 - DNA, 17 bp, Arabidopsis thaliana
aatacaaaaatgaagag

SEQ ID NO: 170855 - DNA, 17 bp, Arabidopsis thaliana
aatacacactgatgctg

SEQ ID NO: 170856 - DNA, 17 bp, Arabidopsis thaliana
aatacagaagaaggaaa

SEQ ID NO: 170857 - DNA, 17 bp, Arabidopsis thaliana
aatacagctgagcagca

SEQ ID NO: 170858 - DNA, 17 bp, Arabidopsis thaliana
aatacaggccgttctcg

SEQ ID NO: 170859 - DNA, 17 bp, Arabidopsis thaliana
aatacatgcgcttttag

SEQ ID NO: 170860 - DNA, 17 bp, Arabidopsis thaliana
aataccagaccagttgg

SEQ ID NO: 170861 - DNA, 17 bp, Arabidopsis thaliana
aataccagttaccacgc

SEQ ID NO: 170862 - DNA, 17 bp, Arabidopsis thaliana
aataccctggatactta

SEQ ID NO: 170863 - DNA, 17 bp, Arabidopsis thaliana
aatacgcgacggggtaa

SEQ ID NO: 170864 - DNA, 17 bp, Arabidopsis thaliana
aatacgcgacggggtac

SEQ ID NO: 170865 - DNA, 17 bp, Arabidopsis thaliana
aatacgcgacggggtat

SEQ ID NO: 170866 - DNA, 17 bp, Arabidopsis thaliana
aatacgcgacggggtgt

SEQ ID NO: 170867 - DNA, 17 bp, Arabidopsis thaliana
aatacgctatgttggac

SEQ ID NO: 170868 - DNA, 17 bp, Arabidopsis thaliana
aatacgggcgagagacc

SEQ ID NO: 170869 - DNA, 17 bp, Arabidopsis thaliana
aatacttgaactaccat

SEQ ID NO: 170870 - DNA, 17 bp, Arabidopsis thaliana
aatagaaactgaatgcc

SEQ ID NO: 170871 - DNA, 17 bp, Arabidopsis thaliana
aatagaaatggcgatgc

SEQ ID NO: 170872 - DNA, 17 bp, Arabidopsis thaliana
aatagaccagaccaacc

SEQ ID NO: 170873 - DNA, 17 bp, Arabidopsis thaliana
aataggagtggcaccga

SEQ ID NO: 170874 - DNA, 17 bp, Arabidopsis thaliana
aataggcagaacccaaa

SEQ ID NO: 170875 - DNA, 17 bp, Arabidopsis thaliana
aatagggttttgggagg

SEQ ID NO: 170876 - DNA, 17 bp, Arabidopsis thaliana
aataggtaggacgtgtc

SEQ ID NO: 170877 - DNA, 17 bp, Arabidopsis thaliana
aatagtaggacgtgtcg

SEQ ID NO: 170878 - DNA, 17 bp, Arabidopsis thaliana
aatataggcctgcctgc

SEQ ID NO: 170879 - DNA, 17 bp, Arabidopsis thaliana
aatatctacaaagcaaa

SEQ ID NO: 170880 - DNA, 17 bp, Arabidopsis thaliana
aatatgtccaatgtctt

SEQ ID NO: 170881 - DNA, 17 bp, Arabidopsis thaliana
aatattcaaggacagat

SEQ ID NO: 170882 - DNA, 17 bp, Arabidopsis thaliana
aatattctaagtccaac

SEQ ID NO: 170883 - DNA, 17 bp, Arabidopsis thaliana
aatattgtccacttgta

SEQ ID NO: 170884 - DNA, 17 bp, Arabidopsis thaliana
aatattgttgtgaccaa

SEQ ID NO: 170885 - DNA, 17 bp, Arabidopsis thaliana
aatattgttgtgactaa

SEQ ID NO: 170886 - DNA, 17 bp, Arabidopsis thaliana
aatcaaacgctatgtta

SEQ ID NO: 170887 - DNA, 17 bp, Arabidopsis thaliana
aatcaaagtttttgggt

SEQ ID NO: 170888 - DNA, 17 bp, Arabidopsis thaliana
aatcaaggcggtccgaa

SEQ ID NO: 170889 - DNA, 17 bp, Arabidopsis thaliana
aatcacgaaaaatctta

SEQ ID NO: 170890 - DNA, 17 bp, Arabidopsis thaliana
aatcagcggggaaagaa

SEQ ID NO: 170891 - DNA, 17 bp, Arabidopsis thaliana
aatcatagaccatcaca

SEQ ID NO: 170892 - DNA, 17 bp, Arabidopsis thaliana
aatcatctattggtcca

SEQ ID NO: 170893 - DNA, 17 bp, Arabidopsis thaliana
aatcatgttttccaatt

SEQ ID NO: 170894 - DNA, 17 bp, Arabidopsis thaliana
aatccaaaaatccatct

SEQ ID NO: 170895 - DNA, 17 bp, Arabidopsis thaliana
aatccaaaatccgatca

SEQ ID NO: 170896 - DNA, 17 bp, Arabidopsis thaliana
aatccaaaatttcatct

SEQ ID NO: 170897 - DNA, 17 bp, Arabidopsis thaliana
aatccaaagaccatctg

SEQ ID NO: 170898 - DNA, 17 bp, Arabidopsis thaliana
aatccaaagatacatct

SEQ ID NO: 170899 - DNA, 17 bp, Arabidopsis thaliana
aatccaaagatcaatct

SEQ ID NO: 170900 - DNA, 17 bp, Arabidopsis thaliana
aatccaaagatcatctg

SEQ ID NO: 170901 - DNA, 17 bp, Arabidopsis thaliana
aatccaaagatccaact

SEQ ID NO: 170902 - DNA, 17 bp, Arabidopsis thaliana
aatccaaagatccacct

SEQ ID NO: 170903 - DNA, 17 bp, Arabidopsis thaliana
aatccaaagatccatca

SEQ ID NO: 170904 - DNA, 17 bp, Arabidopsis thaliana
aatccaaagatccatcc

SEQ ID NO: 170905 - DNA, 17 bp, Arabidopsis thaliana
aatccaaagatccatcg

SEQ ID NO: 170906 - DNA, 17 bp, Arabidopsis thaliana
aatccaaagatccatct

SEQ ID NO: 170907 - DNA, 17 bp, Arabidopsis thaliana
aatccaaagatccatta

SEQ ID NO: 170908 - DNA, 17 bp, Arabidopsis thaliana
aatccaaagatccctct

SEQ ID NO: 170909 - DNA, 17 bp, Arabidopsis thaliana
aatccaaagatccgatc

SEQ ID NO: 170910 - DNA, 17 bp, Arabidopsis thaliana
aatccaaagatcctcat

SEQ ID NO: 170911 - DNA, 17 bp, Arabidopsis thaliana
aatccaaagatcctctg

SEQ ID NO: 170912 - DNA, 17 bp, Arabidopsis thaliana
aatccaaagatctatct

SEQ ID NO: 170913 - DNA, 17 bp, Arabidopsis thaliana
aatccaaagattcatct

SEQ ID NO: 170914 - DNA, 17 bp, Arabidopsis thaliana
aatccaaaggtccatct

SEQ ID NO: 170915 - DNA, 17 bp, Arabidopsis thaliana
aatccaaagtccatctg

SEQ ID NO: 170916 - DNA, 17 bp, Arabidopsis thaliana
aatccaaagttccatct

SEQ ID NO: 170917 - DNA, 17 bp, Arabidopsis thaliana
aatccaaatgtagtcac

SEQ ID NO: 170918 - DNA, 17 bp, Arabidopsis thaliana
aatccaggatggcccac

SEQ ID NO: 170919 - DNA, 17 bp, Arabidopsis thaliana
aatcccacttttgtgga

SEQ ID NO: 170920 - DNA, 17 bp, Arabidopsis thaliana
aatccgaagaccatctg

SEQ ID NO: 170921 - DNA, 17 bp, Arabidopsis thaliana
aatccgactaaaagctc

SEQ ID NO: 170922 - DNA, 17 bp, Arabidopsis thaliana
aatccgagccaaggacg

SEQ ID NO: 170923 - DNA, 17 bp, Arabidopsis thaliana
aatcctacagagcgtgc

SEQ ID NO: 170924 - DNA, 17 bp, Arabidopsis thaliana
aatcctgaatatgaacc

SEQ ID NO: 170925 - DNA, 17 bp, Arabidopsis thaliana
aatcctgaggtcgacgg

SEQ ID NO: 170926 - DNA, 17 bp, Arabidopsis thaliana
aatcctgtagatggatc

SEQ ID NO: 170927 - DNA, 17 bp, Arabidopsis thaliana
aatccttatgggctttt

SEQ ID NO: 170928 - DNA, 17 bp, Arabidopsis thaliana
aatcctttgcagacgac

SEQ ID NO: 170929 - DNA, 17 bp, Arabidopsis thaliana
aatcgaggttctgccaa

SEQ ID NO: 170930 - DNA, 17 bp, Arabidopsis thaliana
aatcgggcggcgggcgc

SEQ ID NO: 170931 - DNA, 17 bp, Arabidopsis thaliana
aatcggtaggagcgacg

SEQ ID NO: 170932 - DNA, 17 bp, Arabidopsis thaliana
aatcggtgctagcttcg

SEQ ID NO: 170933 - DNA, 17 bp, Arabidopsis thaliana
aatctaaatcccttaac

SEQ ID NO: 170934 - DNA, 17 bp, Arabidopsis thaliana
aatctaatttggtgttt

SEQ ID NO: 170935 - DNA, 17 bp, Arabidopsis thaliana
aatctatggaccaagtc

SEQ ID NO: 170936 - DNA, 17 bp, Arabidopsis thaliana
aatctattattaaccac

SEQ ID NO: 170937 - DNA, 17 bp, Arabidopsis thaliana
aatctattgaacatcga

SEQ ID NO: 170938 - DNA, 17 bp, Arabidopsis thaliana
aatctattgaacatcgt

SEQ ID NO: 170939 - DNA, 17 bp, Arabidopsis thaliana
aatctcaagatggcagc

SEQ ID NO: 170940 - DNA, 17 bp, Arabidopsis thaliana
aatctcaaggctgtggg

SEQ ID NO: 170941 - DNA, 17 bp, Arabidopsis thaliana
aatctcacctgtgactg

SEQ ID NO: 170942 - DNA, 17 bp, Arabidopsis thaliana
aatctcaggagggatag

SEQ ID NO: 170943 - DNA, 17 bp, Arabidopsis thaliana
aatctcagtggatcgtg

SEQ ID NO: 170944 - DNA, 17 bp, Arabidopsis thaliana
aatctcatttacttaaa

SEQ ID NO: 170945 - DNA, 17 bp, Arabidopsis thaliana
aatctcggttgtgaaaa

SEQ ID NO: 170946 - DNA, 17 bp, Arabidopsis thaliana
aatctcttctgtcagat

SEQ ID NO: 170947 - DNA, 17 bp, Arabidopsis thaliana
aatctgctcaatggcct

SEQ ID NO: 170948 - DNA, 17 bp, Arabidopsis thaliana
aatctgcttagtggaaa

SEQ ID NO: 170949 - DNA, 17 bp, Arabidopsis thaliana
aatctgtccttgaatag

SEQ ID NO: 170950 - DNA, 17 bp, Arabidopsis thaliana
aatcttccgacaaaaga

SEQ ID NO: 170951 - DNA, 17 bp, Arabidopsis thaliana
aatcttctctgtatcgt

SEQ ID NO: 170952 - DNA, 17 bp, Arabidopsis thaliana
aatcttctctgtgtcgt

SEQ ID NO: 170953 - DNA, 17 bp, Arabidopsis thaliana
aatcttgaggtccctac

SEQ ID NO: 170954 - DNA, 17 bp, Arabidopsis thaliana
aatcttgatgatgctgc

SEQ ID NO: 170955 - DNA, 17 bp, Arabidopsis thaliana
aatcttggtcttagtca

SEQ ID NO: 170956 - DNA, 17 bp, Arabidopsis thaliana
aatctttgaaatttcat

SEQ ID NO: 170957 - DNA, 17 bp, Arabidopsis thaliana
aatctttgacttaatca

SEQ ID NO: 170958 - DNA, 17 bp, Arabidopsis thaliana
aatgaacaagcggatga

SEQ ID NO: 170959 - DNA, 17 bp, Arabidopsis thaliana
aatgaataccagttacc

SEQ ID NO: 170960 - DNA, 17 bp, Arabidopsis thaliana
aatgaatgatgcgagaa

SEQ ID NO: 170961 - DNA, 17 bp, Arabidopsis thaliana
aatgaatgatgcgagag

SEQ ID NO: 170962 - DNA, 17 bp, Arabidopsis thaliana
aatgaatgatgcgatag

SEQ ID NO: 170963 - DNA, 17 bp, Arabidopsis thaliana
aatgaatgatgcggtag

SEQ ID NO: 170964 - DNA, 17 bp, Arabidopsis thaliana
aatgaccgctacactga

SEQ ID NO: 170965 - DNA, 17 bp, Arabidopsis thaliana
aatgaccgctacactgc

SEQ ID NO: 170966 - DNA, 17 bp, Arabidopsis thaliana
aatgacgggtaaggcgg

SEQ ID NO: 170967 - DNA, 17 bp, Arabidopsis thaliana
aatgactcattcgcttg

SEQ ID NO: 170968 - DNA, 17 bp, Arabidopsis thaliana
aatgactgggcgtaaag

SEQ ID NO: 170969 - DNA, 17 bp, Arabidopsis thaliana
aatgaggtggtggacga

SEQ ID NO: 170970 - DNA, 17 bp, Arabidopsis thaliana
aatgataaggatctttc

SEQ ID NO: 170971 - DNA, 17 bp, Arabidopsis thaliana
aatgatgcgcaaatgcg

SEQ ID NO: 170972 - DNA, 17 bp, Arabidopsis thaliana
aatgattaacagggaca

SEQ ID NO: 170973 - DNA, 17 bp, Arabidopsis thaliana
aatgattagaggcataa

SEQ ID NO: 170974 - DNA, 17 bp, Arabidopsis thaliana
aatgattagaggcattg

SEQ ID NO: 170975 - DNA, 17 bp, Arabidopsis thaliana
aatgattgtcagatcta

SEQ ID NO: 170976 - DNA, 17 bp, Arabidopsis thaliana
aatgatttgtctcaaaa

SEQ ID NO: 170977 - DNA, 17 bp, Arabidopsis thaliana
aatgcaaatgggtgtaa

SEQ ID NO: 170978 - DNA, 17 bp, Arabidopsis thaliana
aatgcaccggatcccat

SEQ ID NO: 170979 - DNA, 17 bp, Arabidopsis thaliana
aatgccagccgttcgtt

SEQ ID NO: 170980 - DNA, 17 bp, Arabidopsis thaliana
aatgccctattagtata

SEQ ID NO: 170981 - DNA, 17 bp, Arabidopsis thaliana
aatgcccttggctccag

SEQ ID NO: 170982 - DNA, 17 bp, Arabidopsis thaliana
aatgccgtcgaaaatga

SEQ ID NO: 170983 - DNA, 17 bp, Arabidopsis thaliana
aatgcgaaggtctttag

SEQ ID NO: 170984 - DNA, 17 bp, Arabidopsis thaliana
aatgcgacatttgtatt

SEQ ID NO: 170985 - DNA, 17 bp, Arabidopsis thaliana
aatgcgatccctttgga

SEQ ID NO: 170986 - DNA, 17 bp, Arabidopsis thaliana
aatgcgatccctttgta

SEQ ID NO: 170987 - DNA, 17 bp, Arabidopsis thaliana
aatgctcaggagggata

SEQ ID NO: 170988 - DNA, 17 bp, Arabidopsis thaliana
aatgctgcatgtgttgc

SEQ ID NO: 170989 - DNA, 17 bp, Arabidopsis thaliana
aatgcttctgattcatt

SEQ ID NO: 170990 - DNA, 17 bp, Arabidopsis thaliana
aatgctttctacaggaa

SEQ ID NO: 170991 - DNA, 17 bp, Arabidopsis thaliana
aatgctttgtccacgtt

SEQ ID NO: 170992 - DNA, 17 bp, Arabidopsis thaliana
aatggacaatgaatcaa

SEQ ID NO: 170993 - DNA, 17 bp, Arabidopsis thaliana
aatggacaatgaatcag

SEQ ID NO: 170994 - DNA, 17 bp, Arabidopsis thaliana
aatggacttgatctacc

SEQ ID NO: 170995 - DNA, 17 bp, Arabidopsis thaliana
aatggagaaatatctgg

SEQ ID NO: 170996 - DNA, 17 bp, Arabidopsis thaliana
aatggatcgtaataagt

SEQ ID NO: 170997 - DNA, 17 bp, Arabidopsis thaliana
aatggatggcgcttaag

SEQ ID NO: 170998 - DNA, 17 bp, Arabidopsis thaliana
aatggatgttggtattc

SEQ ID NO: 170999 - DNA, 17 bp, Arabidopsis thaliana
aatggcgagtaaaatca

SEQ ID NO: 171000 - DNA, 17 bp, Arabidopsis thaliana
aatggcgatgcatgtga

SEQ ID NO: 171001 - DNA, 17 bp, Arabidopsis thaliana
aatggcgtcatcacttg

SEQ ID NO: 171002 - DNA, 17 bp, Arabidopsis thaliana
aatggctatccctacaa

SEQ ID NO: 171003 - DNA, 17 bp, Arabidopsis thaliana
aatggctgggttttggg

SEQ ID NO: 171004 - DNA, 17 bp, Arabidopsis thaliana
aatgggagatgcccgga

SEQ ID NO: 171005 - DNA, 17 bp, Arabidopsis thaliana
aatgggagatgtccgga

SEQ ID NO: 171006 - DNA, 17 bp, Arabidopsis thaliana
aatgggaggtaaccgga

SEQ ID NO: 171007 - DNA, 17 bp, Arabidopsis thaliana
aatgggatggagaacaa

SEQ ID NO: 171008 - DNA, 17 bp, Arabidopsis thaliana
aatgggtcagattctaa

SEQ ID NO: 171009 - DNA, 17 bp, Arabidopsis thaliana
aatgggtcagattctat

SEQ ID NO: 171010 - DNA, 17 bp, Arabidopsis thaliana
aatggtctattcgctta

SEQ ID NO: 171011 - DNA, 17 bp, Arabidopsis thaliana
aatggtctattcgcttg

SEQ ID NO: 171012 - DNA, 17 bp, Arabidopsis thaliana
aatggtggagaccataa

SEQ ID NO: 171013 - DNA, 17 bp, Arabidopsis thaliana
aatggtggagaccatac

SEQ ID NO: 171014 - DNA, 17 bp, Arabidopsis thaliana
aatggtgtaacgactga

SEQ ID NO: 171015 - DNA, 17 bp, Arabidopsis thaliana
aatgtagctgcggtttt

SEQ ID NO: 171016 - DNA, 17 bp, Arabidopsis thaliana
aatgtatgcatgtatgg

SEQ ID NO: 171017 - DNA, 17 bp, Arabidopsis thaliana
aatgtcaagaacctgca

SEQ ID NO: 171018 - DNA, 17 bp, Arabidopsis thaliana
aatgtcctccgcccgca

SEQ ID NO: 171019 - DNA, 17 bp, Arabidopsis thaliana
aatgtcttcctcctgtt

SEQ ID NO: 171020 - DNA, 17 bp, Arabidopsis thaliana
aatgtcttgctgtaatg

SEQ ID NO: 171021 - DNA, 17 bp, Arabidopsis thaliana
aatgtctttatccaaga

SEQ ID NO: 171022 - DNA, 17 bp, Arabidopsis thaliana
aatgtgaaactcaagtc

SEQ ID NO: 171023 - DNA, 17 bp, Arabidopsis thaliana
aatgtgagttttccttg

SEQ ID NO: 171024 - DNA, 17 bp, Arabidopsis thaliana
aatgtgattgcgcttat

SEQ ID NO: 171025 - DNA, 17 bp, Arabidopsis thaliana
aatgtgtctcacgaaac

SEQ ID NO: 171026 - DNA, 17 bp, Arabidopsis thaliana
aatgttcagtggctagt

SEQ ID NO: 171027 - DNA, 17 bp, Arabidopsis thaliana
aatgttcgcaacccacc

SEQ ID NO: 171028 - DNA, 17 bp, Arabidopsis thaliana
aatgttcgcaacccgac

SEQ ID NO: 171029 - DNA, 17 bp, Arabidopsis thaliana
aatgttggtcacaacaa

SEQ ID NO: 171030 - DNA, 17 bp, Arabidopsis thaliana
aatgttgtctggatcga

SEQ ID NO: 171031 - DNA, 17 bp, Arabidopsis thaliana
aatgtttgggagtagcc

SEQ ID NO: 171032 - DNA, 17 bp, Arabidopsis thaliana
aattaactgagcactag

SEQ ID NO: 171033 - DNA, 17 bp, Arabidopsis thaliana
aattaagccgcaggctc

SEQ ID NO: 171034 - DNA, 17 bp, Arabidopsis thaliana
aattaagtactgatgaa

SEQ ID NO: 171035 - DNA, 17 bp, Arabidopsis thaliana
aattaagtactgatgac

SEQ ID NO: 171036 - DNA, 17 bp, Arabidopsis thaliana
aattacaagtgcaaaag

SEQ ID NO: 171037 - DNA, 17 bp, Arabidopsis thaliana
aattacagttgttggct

SEQ ID NO: 171038 - DNA, 17 bp, Arabidopsis thaliana
aattaccaccgagcggc

SEQ ID NO: 171039 - DNA, 17 bp, Arabidopsis thaliana
aattaccaccgagtggc

SEQ ID NO: 171040 - DNA, 17 bp, Arabidopsis thaliana
aattaccgcggctgcta

SEQ ID NO: 171041 - DNA, 17 bp, Arabidopsis thaliana
aattaccgcggctgctg

SEQ ID NO: 171042 - DNA, 17 bp, Arabidopsis thaliana
aattagatctgacaatc

SEQ ID NO: 171043 - DNA, 17 bp, Arabidopsis thaliana
aattagggttcgattca

SEQ ID NO: 171044 - DNA, 17 bp, Arabidopsis thaliana
aattagtcgcatcctgt

SEQ ID NO: 171045 - DNA, 17 bp, Arabidopsis thaliana
aattagtgagatttggg

SEQ ID NO: 171046 - DNA, 17 bp, Arabidopsis thaliana
aattagttatgccaatg

SEQ ID NO: 171047 - DNA, 17 bp, Arabidopsis thaliana
aattcaaataattcggg

SEQ ID NO: 171048 - DNA, 17 bp, Arabidopsis thaliana
aattcaaccaagcgcgg

SEQ ID NO: 171049 - DNA, 17 bp, Arabidopsis thaliana
aattcaagacggttaca

SEQ ID NO: 171050 - DNA, 17 bp, Arabidopsis thaliana
aattcacaagagactta

SEQ ID NO: 171051 - DNA, 17 bp, Arabidopsis thaliana
aattcacaagagacttt

SEQ ID NO: 171052 - DNA, 17 bp, Arabidopsis thaliana
aattcacgggcgatgtt

SEQ ID NO: 171053 - DNA, 17 bp, Arabidopsis thaliana
aattcagactgtgaaac

SEQ ID NO: 171054 - DNA, 17 bp, Arabidopsis thaliana
aattcaggagaacatga

SEQ ID NO: 171055 - DNA, 17 bp, Arabidopsis thaliana
aattcaggagagggata

SEQ ID NO: 171056 - DNA, 17 bp, Arabidopsis thaliana
aattcagtagggaccta

SEQ ID NO: 171057 - DNA, 17 bp, Arabidopsis thaliana
aattcagtagggacctc

SEQ ID NO: 171058 - DNA, 17 bp, Arabidopsis thaliana
aattcagtagggagatc

SEQ ID NO: 171059 - DNA, 17 bp, Arabidopsis thaliana
aattcatagctgcttct

SEQ ID NO: 171060 - DNA, 17 bp, Arabidopsis thaliana
aattcatcgatgagggt

SEQ ID NO: 171061 - DNA, 17 bp, Arabidopsis thaliana
aattccacagggtcgaa

SEQ ID NO: 171062 - DNA, 17 bp, Arabidopsis thaliana
aattcccggacagagag

SEQ ID NO: 171063 - DNA, 17 bp, Arabidopsis thaliana
aattccctcattaattg

SEQ ID NO: 171064 - DNA, 17 bp, Arabidopsis thaliana
aattccgcgatcaaccg

SEQ ID NO: 171065 - DNA, 17 bp, Arabidopsis thaliana
aattcctagtaagcgcg

SEQ ID NO: 171066 - DNA, 17 bp, Arabidopsis thaliana
aattcctcgttgaagac

SEQ ID NO: 171067 - DNA, 17 bp, Arabidopsis thaliana
aattcgagataagcagt

SEQ ID NO: 171068 - DNA, 17 bp, Arabidopsis thaliana
aattctagagctaatac

SEQ ID NO: 171069 - DNA, 17 bp, Arabidopsis thaliana
aattctagctagctaac

SEQ ID NO: 171070 - DNA, 17 bp, Arabidopsis thaliana
aattctatgtgttcctg

SEQ ID NO: 171071 - DNA, 17 bp, Arabidopsis thaliana
aattctcacgccaggtc

SEQ ID NO: 171072 - DNA, 17 bp, Arabidopsis thaliana
aattctcggacccggtc

SEQ ID NO: 171073 - DNA, 17 bp, Arabidopsis thaliana
aattctcggagacaatt

SEQ ID NO: 171074 - DNA, 17 bp, Arabidopsis thaliana
aattctctatttcggcg

SEQ ID NO: 171075 - DNA, 17 bp, Arabidopsis thaliana
aattctgaaattacaaa

SEQ ID NO: 171076 - DNA, 17 bp, Arabidopsis thaliana
aattgaagacagtaaag

SEQ ID NO: 171077 - DNA, 17 bp, Arabidopsis thaliana
aattgacatatattgag

SEQ ID NO: 171078 - DNA, 17 bp, Arabidopsis thaliana
aattgacggaagggcac

SEQ ID NO: 171079 - DNA, 17 bp, Arabidopsis thaliana
aattgagaaatctcgaa

SEQ ID NO: 171080 - DNA, 17 bp, Arabidopsis thaliana
aattgattagcctcacc

SEQ ID NO: 171081 - DNA, 17 bp, Arabidopsis thaliana
aattgccgtgatcgaaa

SEQ ID NO: 171082 - DNA, 17 bp, Arabidopsis thaliana
aattgccgtgatcgatg

SEQ ID NO: 171083 - DNA, 17 bp, Arabidopsis thaliana
aattgctgagccagaaa

SEQ ID NO: 171084 - DNA, 17 bp, Arabidopsis thaliana
aattgctgagccagaac

SEQ ID NO: 171085 - DNA, 17 bp, Arabidopsis thaliana
aattggatgatcgggcc

SEQ ID NO: 171086 - DNA, 17 bp, Arabidopsis thaliana
aattgggtttatgcttg

SEQ ID NO: 171087 - DNA, 17 bp, Arabidopsis thaliana
aattggtttgcgggcat

SEQ ID NO: 171088 - DNA, 17 bp, Arabidopsis thaliana
aattgtcaacgtctaca

SEQ ID NO: 171089 - DNA, 17 bp, Arabidopsis thaliana
aattgtcagtataaatc

SEQ ID NO: 171090 - DNA, 17 bp, Arabidopsis thaliana
aattgtgctgatggact

SEQ ID NO: 171091 - DNA, 17 bp, Arabidopsis thaliana
aattgtgttacttagta

SEQ ID NO: 171092 - DNA, 17 bp, Arabidopsis thaliana
aattgttcaaagggatt

SEQ ID NO: 171093 - DNA, 17 bp, Arabidopsis thaliana
aattgttgccgttgggg

SEQ ID NO: 171094 - DNA, 17 bp, Arabidopsis thaliana
aattgttgtttgcccga

SEQ ID NO: 171095 - DNA, 17 bp, Arabidopsis thaliana
aatttaggatacagtca

SEQ ID NO: 171096 - DNA, 17 bp, Arabidopsis thaliana
aatttagggtttgaaaa

SEQ ID NO: 171097 - DNA, 17 bp, Arabidopsis thaliana
aatttcaaaattgaccc

SEQ ID NO: 171098 - DNA, 17 bp, Arabidopsis thaliana
aatttcatcgtgatggg

SEQ ID NO: 171099 - DNA, 17 bp, Arabidopsis thaliana
aatttctaaaccgaccg

SEQ ID NO: 171100 - DNA, 17 bp, Arabidopsis thaliana
aatttctaggaagggac

SEQ ID NO: 171101 - DNA, 17 bp, Arabidopsis thaliana
aatttctgctttatcaa

SEQ ID NO: 171102 - DNA, 17 bp, Arabidopsis thaliana
aatttctgctttattaa

SEQ ID NO: 171103 - DNA, 17 bp, Arabidopsis thaliana
aatttgatgtggtaatc

SEQ ID NO: 171104 - DNA, 17 bp, Arabidopsis thaliana
aatttggattgattttc

SEQ ID NO: 171105 - DNA, 17 bp, Arabidopsis thaliana
aattttcgtgttggttc

SEQ ID NO: 171106 - DNA, 17 bp, Arabidopsis thaliana
aattttgaaattacaaa

SEQ ID NO: 171107 - DNA, 17 bp, Arabidopsis thaliana
aattttggggattttgt

SEQ ID NO: 171108 - DNA, 17 bp, Arabidopsis thaliana
aatttttaatttggaca

SEQ ID NO: 171109 - DNA, 17 bp, Arabidopsis thaliana
aattttttacgctcttg

SEQ ID NO: 171110 - DNA, 17 bp, Arabidopsis thaliana
aattttttttgacaggt

SEQ ID NO: 171111 - DNA, 17 bp, Arabidopsis thaliana
aattttttttggactta

SEQ ID NO: 171112 - DNA, 17 bp, Arabidopsis thaliana
aattttttttggacttt

SEQ ID NO: 171113 - DNA, 17 bp, Arabidopsis thaliana
aatttttttttttttta

SEQ ID NO: 171114 - DNA, 17 bp, Arabidopsis thaliana
acaaaaacatcatttga

SEQ ID NO: 171115 - DNA, 17 bp, Arabidopsis thaliana
acaaaaacatcatttgt

SEQ ID NO: 171116 - DNA, 17 bp, Arabidopsis thaliana
acaaaaattcaaataaa

SEQ ID NO: 171117 - DNA, 17 bp, Arabidopsis thaliana
acaaaaattcaaataat

SEQ ID NO: 171118 - DNA, 17 bp, Arabidopsis thaliana
acaaaaattgtgtagac

SEQ ID NO: 171119 - DNA, 17 bp, Arabidopsis thaliana
acaaaacgggcgaggca

SEQ ID NO: 171120 - DNA, 17 bp, Arabidopsis thaliana
acaaaagatctggtgat

SEQ ID NO: 171121 - DNA, 17 bp, Arabidopsis thaliana
acaaaagtccgagaccc

SEQ ID NO: 171122 - DNA, 17 bp, Arabidopsis thaliana
acaaaataaggaatgca

SEQ ID NO: 171123 - DNA, 17 bp, Arabidopsis thaliana
acaaaataaggaatgct

SEQ ID NO: 171124 - DNA, 17 bp, Arabidopsis thaliana
acaaaatccccaaaaca

SEQ ID NO: 171125 - DNA, 17 bp, Arabidopsis thaliana
acaaaatccccaaaatt

SEQ ID NO: 171126 - DNA, 17 bp, Arabidopsis thaliana
acaaaatcccggctcag

SEQ ID NO: 171127 - DNA, 17 bp, Arabidopsis thaliana
acaaaatgagcactaca

SEQ ID NO: 171128 - DNA, 17 bp, Arabidopsis thaliana
acaaaatttctaaaccg

SEQ ID NO: 171129 - DNA, 17 bp, Arabidopsis thaliana
acaaacaccttggatgt

SEQ ID NO: 171130 - DNA, 17 bp, Arabidopsis thaliana
acaaactggtaaacaaa

SEQ ID NO: 171131 - DNA, 17 bp, Arabidopsis thaliana
acaaacttgatcgctca

SEQ ID NO: 171132 - DNA, 17 bp, Arabidopsis thaliana
acaaacttgatctctca

SEQ ID NO: 171133 - DNA, 17 bp, Arabidopsis thaliana
acaaacttttcccacaa

SEQ ID NO: 171134 - DNA, 17 bp, Arabidopsis thaliana
acaaagaggaagataga

SEQ ID NO: 171135 - DNA, 17 bp, Arabidopsis thaliana
acaaagcattgcgatgg

SEQ ID NO: 171136 - DNA, 17 bp, Arabidopsis thaliana
acaaagccctagagaga

SEQ ID NO: 171137 - DNA, 17 bp, Arabidopsis thaliana
acaaagcgtccggtgag

SEQ ID NO: 171138 - DNA, 17 bp, Arabidopsis thaliana
acaaagggcagggacga

SEQ ID NO: 171139 - DNA, 17 bp, Arabidopsis thaliana
acaaagggcagggacgt

SEQ ID NO: 171140 - DNA, 17 bp, Arabidopsis thaliana
acaaatcaataggaaaa

SEQ ID NO: 171141 - DNA, 17 bp, Arabidopsis thaliana
acaaatcaataggaaat

SEQ ID NO: 171142 - DNA, 17 bp, Arabidopsis thaliana
acaaattgacggatttg

SEQ ID NO: 171143 - DNA, 17 bp, Arabidopsis thaliana
acaacaggtggacgagc

SEQ ID NO: 171144 - DNA, 17 bp, Arabidopsis thaliana
acaaccacgagatccct

SEQ ID NO: 171145 - DNA, 17 bp, Arabidopsis thaliana
acaactcacctgccgaa

SEQ ID NO: 171146 - DNA, 17 bp, Arabidopsis thaliana
acaactcctaatacata

SEQ ID NO: 171147 - DNA, 17 bp, Arabidopsis thaliana
acaactcctaatacatt

SEQ ID NO: 171148 - DNA, 17 bp, Arabidopsis thaliana
acaacttcattaggcaa

SEQ ID NO: 171149 - DNA, 17 bp, Arabidopsis thaliana
acaactttttttacgga

SEQ ID NO: 171150 - DNA, 17 bp, Arabidopsis thaliana
acaactttttttacggg

SEQ ID NO: 171151 - DNA, 17 bp, Arabidopsis thaliana
acaagagacttttttta

SEQ ID NO: 171152 - DNA, 17 bp, Arabidopsis thaliana
acaagagactttttttg

SEQ ID NO: 171153 - DNA, 17 bp, Arabidopsis thaliana
acaagcacgcatggaac

SEQ ID NO: 171154 - DNA, 17 bp, Arabidopsis thaliana
acaagcagaaaatctac

SEQ ID NO: 171155 - DNA, 17 bp, Arabidopsis thaliana
acaagcgcttcccgatc

SEQ ID NO: 171156 - DNA, 17 bp, Arabidopsis thaliana
acaaggagcgaagcccg

SEQ ID NO: 171157 - DNA, 17 bp, Arabidopsis thaliana
acaaggggaatctgact

SEQ ID NO: 171158 - DNA, 17 bp, Arabidopsis thaliana
acaaggggattgcatag

SEQ ID NO: 171159 - DNA, 17 bp, Arabidopsis thaliana
acaaggtccgaacgacg

SEQ ID NO: 171160 - DNA, 17 bp, Arabidopsis thaliana
acaagtgtgggctcgac

SEQ ID NO: 171161 - DNA, 17 bp, Arabidopsis thaliana
acaagttgaccttggct

SEQ ID NO: 171162 - DNA, 17 bp, Arabidopsis thaliana
acaataccgggctcttt

SEQ ID NO: 171163 - DNA, 17 bp, Arabidopsis thaliana
acaatccgggaattcgc

SEQ ID NO: 171164 - DNA, 17 bp, Arabidopsis thaliana
acaatctcaagatggca

SEQ ID NO: 171165 - DNA, 17 bp, Arabidopsis thaliana
acaatcttgatgatgca

SEQ ID NO: 171166 - DNA, 17 bp, Arabidopsis thaliana
acaatcttgatgatgcg

SEQ ID NO: 171167 - DNA, 17 bp, Arabidopsis thaliana
acaatcttgatgatgct

SEQ ID NO: 171168 - DNA, 17 bp, Arabidopsis thaliana
acaatgtcttgctgtaa

SEQ ID NO: 171169 - DNA, 17 bp, Arabidopsis thaliana
acaattcagtagggacc

SEQ ID NO: 171170 - DNA, 17 bp, Arabidopsis thaliana
acaattggtcatcgcgc

SEQ ID NO: 171171 - DNA, 17 bp, Arabidopsis thaliana
acaattttttttggact

SEQ ID NO: 171172 - DNA, 17 bp, Arabidopsis thaliana
acacattggtgaagatg

SEQ ID NO: 171173 - DNA, 17 bp, Arabidopsis thaliana
acaccaaaggcggaccg

SEQ ID NO: 171174 - DNA, 17 bp, Arabidopsis thaliana
acacccgtggcctaatg

SEQ ID NO: 171175 - DNA, 17 bp, Arabidopsis thaliana
acaccctgatggtgcaa

SEQ ID NO: 171176 - DNA, 17 bp, Arabidopsis thaliana
acaccgcccgtcgctac

SEQ ID NO: 171177 - DNA, 17 bp, Arabidopsis thaliana
acaccgcccgtcgctag

SEQ ID NO: 171178 - DNA, 17 bp, Arabidopsis thaliana
acacctgtaagcaacca

SEQ ID NO: 171179 - DNA, 17 bp, Arabidopsis thaliana
acacgagatttctgact

SEQ ID NO: 171180 - DNA, 17 bp, Arabidopsis thaliana
acacgatgttcaataga

SEQ ID NO: 171181 - DNA, 17 bp, Arabidopsis thaliana
acacggaatcgagagct

SEQ ID NO: 171182 - DNA, 17 bp, Arabidopsis thaliana
acacggggaaacttacc

SEQ ID NO: 171183 - DNA, 17 bp, Arabidopsis thaliana
acacggggaggtagtga

SEQ ID NO: 171184 - DNA, 17 bp, Arabidopsis thaliana
acacgtctgcctgggtg

SEQ ID NO: 171185 - DNA, 17 bp, Arabidopsis thaliana
acacgtggcaatgaact

SEQ ID NO: 171186 - DNA, 17 bp, Arabidopsis thaliana
acactacaatacaggga

SEQ ID NO: 171187 - DNA, 17 bp, Arabidopsis thaliana
acactacaatacagggg

SEQ ID NO: 171188 - DNA, 17 bp, Arabidopsis thaliana
acactcagccacatctc

SEQ ID NO: 171189 - DNA, 17 bp, Arabidopsis thaliana
acactctgatgatgcaa

SEQ ID NO: 171190 - DNA, 17 bp, Arabidopsis thaliana
acactctgatggtgcaa

SEQ ID NO: 171191 - DNA, 17 bp, Arabidopsis thaliana
acactctgattgtgcaa

SEQ ID NO: 171192 - DNA, 17 bp, Arabidopsis thaliana
acactctgctggccggt

SEQ ID NO: 171193 - DNA, 17 bp, Arabidopsis thaliana
acactctggtggtgcaa

SEQ ID NO: 171194 - DNA, 17 bp, Arabidopsis thaliana
acacttagttttgtaca

SEQ ID NO: 171195 - DNA, 17 bp, Arabidopsis thaliana
acacttggtatgggacg

SEQ ID NO: 171196 - DNA, 17 bp, Arabidopsis thaliana
acactttggcaaccatc

SEQ ID NO: 171197 - DNA, 17 bp, Arabidopsis thaliana
acagaacgctaccgagg

SEQ ID NO: 171198 - DNA, 17 bp, Arabidopsis thaliana
acagaagagagtgagca

SEQ ID NO: 171199 - DNA, 17 bp, Arabidopsis thaliana
acagaccggtagactta

SEQ ID NO: 171200 - DNA, 17 bp, Arabidopsis thaliana
acagaccggtagacttg

SEQ ID NO: 171201 - DNA, 17 bp, Arabidopsis thaliana
acagactgcattttttg

SEQ ID NO: 171202 - DNA, 17 bp, Arabidopsis thaliana
acagactgtcatggcga

SEQ ID NO: 171203 - DNA, 17 bp, Arabidopsis thaliana
acagaggaagaagatga

SEQ ID NO: 171204 - DNA, 17 bp, Arabidopsis thaliana
acagaggccatgcgatc

SEQ ID NO: 171205 - DNA, 17 bp, Arabidopsis thaliana
acagatgctgcaaggga

SEQ ID NO: 171206 - DNA, 17 bp, Arabidopsis thaliana
acagatgctgcaagggt

SEQ ID NO: 171207 - DNA, 17 bp, Arabidopsis thaliana
acagattgagtgcatca

SEQ ID NO: 171208 - DNA, 17 bp, Arabidopsis thaliana
acagattggagttaaca

SEQ ID NO: 171209 - DNA, 17 bp, Arabidopsis thaliana
acagattggagttaact

SEQ ID NO: 171210 - DNA, 17 bp, Arabidopsis thaliana
acagcaagacattgtta

SEQ ID NO: 171211 - DNA, 17 bp, Arabidopsis thaliana
acagcaagacattgttg

SEQ ID NO: 171212 - DNA, 17 bp, Arabidopsis thaliana
acagcctgcccaccctg

SEQ ID NO: 171213 - DNA, 17 bp, Arabidopsis thaliana
acagcgaaactgcgaat

SEQ ID NO: 171214 - DNA, 17 bp, Arabidopsis thaliana
acagcgaagataacaca

SEQ ID NO: 171215 - DNA, 17 bp, Arabidopsis thaliana
acagcgacgggattgaa

SEQ ID NO: 171216 - DNA, 17 bp, Arabidopsis thaliana
acagctgagcagcatcc

SEQ ID NO: 171217 - DNA, 17 bp, Arabidopsis thaliana
acagctgcaagatctta

SEQ ID NO: 171218 - DNA, 17 bp, Arabidopsis thaliana
acaggagcgtgatgata

SEQ ID NO: 171219 - DNA, 17 bp, Arabidopsis thaliana
acaggcaactattttcc

SEQ ID NO: 171220 - DNA, 17 bp, Arabidopsis thaliana
acaggcgctgtgctatg

SEQ ID NO: 171221 - DNA, 17 bp, Arabidopsis thaliana
acagggaacaagcaaag

SEQ ID NO: 171222 - DNA, 17 bp, Arabidopsis thaliana
acagggaacaagcagag

SEQ ID NO: 171223 - DNA, 17 bp, Arabidopsis thaliana
acagggacagtcggggg

SEQ ID NO: 171224 - DNA, 17 bp, Arabidopsis thaliana
acaggtaggtgcgggcg

SEQ ID NO: 171225 - DNA, 17 bp, Arabidopsis thaliana
acaggtcaaaatcagta

SEQ ID NO: 171226 - DNA, 17 bp, Arabidopsis thaliana
acaggtcaatgtcccgg

SEQ ID NO: 171227 - DNA, 17 bp, Arabidopsis thaliana
acaggtctgtgatgccc

SEQ ID NO: 171228 - DNA, 17 bp, Arabidopsis thaliana
acaggttggcggtgtcc

SEQ ID NO: 171229 - DNA, 17 bp, Arabidopsis thaliana
acagtaaagtagatgat

SEQ ID NO: 171230 - DNA, 17 bp, Arabidopsis thaliana
acagtcagctcagaact

SEQ ID NO: 171231 - DNA, 17 bp, Arabidopsis thaliana
acagtctgaattcgttc

SEQ ID NO: 171232 - DNA, 17 bp, Arabidopsis thaliana
acagtctttattagtga

SEQ ID NO: 171233 - DNA, 17 bp, Arabidopsis thaliana
acagtctttattagtta

SEQ ID NO: 171234 - DNA, 17 bp, Arabidopsis thaliana
acagtgccttcgcagac

SEQ ID NO: 171235 - DNA, 17 bp, Arabidopsis thaliana
acatacaactcaagaaa

SEQ ID NO: 171236 - DNA, 17 bp, Arabidopsis thaliana
acataccgttggggtgc

SEQ ID NO: 171237 - DNA, 17 bp, Arabidopsis thaliana
acatacgaccataccca

SEQ ID NO: 171238 - DNA, 17 bp, Arabidopsis thaliana
acatacgaccatactca

SEQ ID NO: 171239 - DNA, 17 bp, Arabidopsis thaliana
acatacgaccatattca

SEQ ID NO: 171240 - DNA, 17 bp, Arabidopsis thaliana
acatacgaccatgccca

SEQ ID NO: 171241 - DNA, 17 bp, Arabidopsis thaliana
acatacgaccgtaccca

SEQ ID NO: 171242 - DNA, 17 bp, Arabidopsis thaliana
acatacggccataccca

SEQ ID NO: 171243 - DNA, 17 bp, Arabidopsis thaliana
acatactaccataccca

SEQ ID NO: 171244 - DNA, 17 bp, Arabidopsis thaliana
acatactggtaaacggg

SEQ ID NO: 171245 - DNA, 17 bp, Arabidopsis thaliana
acatactggtaaatgga

SEQ ID NO: 171246 - DNA, 17 bp, Arabidopsis thaliana
acatactggtaaatggg

SEQ ID NO: 171247 - DNA, 17 bp, Arabidopsis thaliana
acatactggtgaatggg

SEQ ID NO: 171248 - DNA, 17 bp, Arabidopsis thaliana
acataggcctaggaagg

SEQ ID NO: 171249 - DNA, 17 bp, Arabidopsis thaliana
acatatcgagagcaaca

SEQ ID NO: 171250 - DNA, 17 bp, Arabidopsis thaliana
acatcaatatgcttcaa

SEQ ID NO: 171251 - DNA, 17 bp, Arabidopsis thaliana
acatcagtaaccgtaca

SEQ ID NO: 171252 - DNA, 17 bp, Arabidopsis thaliana
acatccaaggaaggcag

SEQ ID NO: 171253 - DNA, 17 bp, Arabidopsis thaliana
acatccgcaaaacttcg

SEQ ID NO: 171254 - DNA, 17 bp, Arabidopsis thaliana
acatccggtcagcatca

SEQ ID NO: 171255 - DNA, 17 bp, Arabidopsis thaliana
acatcgcccgtgaatta

SEQ ID NO: 171256 - DNA, 17 bp, Arabidopsis thaliana
acatcgccgccgttctc

SEQ ID NO: 171257 - DNA, 17 bp, Arabidopsis thaliana
acatcggatggatctac

SEQ ID NO: 171258 - DNA, 17 bp, Arabidopsis thaliana
acatctacttttttttt

SEQ ID NO: 171259 - DNA, 17 bp, Arabidopsis thaliana
acatctcaggtagagtc

SEQ ID NO: 171260 - DNA, 17 bp, Arabidopsis thaliana
acatctcccattttttt

SEQ ID NO: 171261 - DNA, 17 bp, Arabidopsis thaliana
acatctgaaggttagga

SEQ ID NO: 171262 - DNA, 17 bp, Arabidopsis thaliana
acatctggaccaccgag

SEQ ID NO: 171263 - DNA, 17 bp, Arabidopsis thaliana
acatctggtctaatacc

SEQ ID NO: 171264 - DNA, 17 bp, Arabidopsis thaliana
acatcttgcttgcttct

SEQ ID NO: 171265 - DNA, 17 bp, Arabidopsis thaliana
acatgaactttgattta

SEQ ID NO: 171266 - DNA, 17 bp, Arabidopsis thaliana
acatgaactttgatttt

SEQ ID NO: 171267 - DNA, 17 bp, Arabidopsis thaliana
acatgcgcttttagggt

SEQ ID NO: 171268 - DNA, 17 bp, Arabidopsis thaliana
acatggacatatgatct

SEQ ID NO: 171269 - DNA, 17 bp, Arabidopsis thaliana
acatggtccaagcccgg

SEQ ID NO: 171270 - DNA, 17 bp, Arabidopsis thaliana
acatgtgccttcgctga

SEQ ID NO: 171271 - DNA, 17 bp, Arabidopsis thaliana
acattcaggaagaatca

SEQ ID NO: 171272 - DNA, 17 bp, Arabidopsis thaliana
acattcatctagttaga

SEQ ID NO: 171273 - DNA, 17 bp, Arabidopsis thaliana
acattggacatattcca

SEQ ID NO: 171274 - DNA, 17 bp, Arabidopsis thaliana
acattgtcaggtgggga

SEQ ID NO: 171275 - DNA, 17 bp, Arabidopsis thaliana
acatttacctaattcgt

SEQ ID NO: 171276 - DNA, 17 bp, Arabidopsis thaliana
acatttggtctaattcc

SEQ ID NO: 171277 - DNA, 17 bp, Arabidopsis thaliana
acattttcgatgtctag

SEQ ID NO: 171278 - DNA, 17 bp, Arabidopsis thaliana
accaaacgaattggcga

SEQ ID NO: 171279 - DNA, 17 bp, Arabidopsis thaliana
accaacagggattgccc

SEQ ID NO: 171280 - DNA, 17 bp, Arabidopsis thaliana
accaatggatccttctg

SEQ ID NO: 171281 - DNA, 17 bp, Arabidopsis thaliana
accaccaggagtggagc

SEQ ID NO: 171282 - DNA, 17 bp, Arabidopsis thaliana
accacccgttctcgaga

SEQ ID NO: 171283 - DNA, 17 bp, Arabidopsis thaliana
accacctccatggggat

SEQ ID NO: 171284 - DNA, 17 bp, Arabidopsis thaliana
accacgcagttgcccaa

SEQ ID NO: 171285 - DNA, 17 bp, Arabidopsis thaliana
accacgcgacgtgcggt

SEQ ID NO: 171286 - DNA, 17 bp, Arabidopsis thaliana
accactaagctgcttgt

SEQ ID NO: 171287 - DNA, 17 bp, Arabidopsis thaliana
accactaagttggttat

SEQ ID NO: 171288 - DNA, 17 bp, Arabidopsis thaliana
accagaaggatgataaa

SEQ ID NO: 171289 - DNA, 17 bp, Arabidopsis thaliana
accagacttgcgccggg

SEQ ID NO: 171290 - DNA, 17 bp, Arabidopsis thaliana
accagatcacaacagaa

SEQ ID NO: 171291 - DNA, 17 bp, Arabidopsis thaliana
accagatcacaacagca

SEQ ID NO: 171292 - DNA, 17 bp, Arabidopsis thaliana
accagatcacaacagga

SEQ ID NO: 171293 - DNA, 17 bp, Arabidopsis thaliana
accagcaatagacgcgc

SEQ ID NO: 171294 - DNA, 17 bp, Arabidopsis thaliana
accagcggcaagcccag

SEQ ID NO: 171295 - DNA, 17 bp, Arabidopsis thaliana
accagcggtgtggtgtt

SEQ ID NO: 171296 - DNA, 17 bp, Arabidopsis thaliana
accaggagcgtatcgcc

SEQ ID NO: 171297 - DNA, 17 bp, Arabidopsis thaliana
accaggagtggagcctg

SEQ ID NO: 171298 - DNA, 17 bp, Arabidopsis thaliana
accaggatttcgtctgg

SEQ ID NO: 171299 - DNA, 17 bp, Arabidopsis thaliana
accaggtccagacataa

SEQ ID NO: 171300 - DNA, 17 bp, Arabidopsis thaliana
accagtatcttatgcgt

SEQ ID NO: 171301 - DNA, 17 bp, Arabidopsis thaliana
accagtatgttatgcgt

SEQ ID NO: 171302 - DNA, 17 bp, Arabidopsis thaliana
accagtgagggccgaac

SEQ ID NO: 171303 - DNA, 17 bp, Arabidopsis thaliana
accagtttgttctccat

SEQ ID NO: 171304 - DNA, 17 bp, Arabidopsis thaliana
accatcctttgctgatg

SEQ ID NO: 171305 - DNA, 17 bp, Arabidopsis thaliana
acccaatcctgacacgg

SEQ ID NO: 171306 - DNA, 17 bp, Arabidopsis thaliana
acccaatctgggaagca

SEQ ID NO: 171307 - DNA, 17 bp, Arabidopsis thaliana
acccattgatcagtgaa

SEQ ID NO: 171308 - DNA, 17 bp, Arabidopsis thaliana
accccattgtgctagga

SEQ ID NO: 171309 - DNA, 17 bp, Arabidopsis thaliana
accccgaccatgtcgaa

SEQ ID NO: 171310 - DNA, 17 bp, Arabidopsis thaliana
accccgtcagttgcgtg

SEQ ID NO: 171311 - DNA, 17 bp, Arabidopsis thaliana
accccttacaatgtcga

SEQ ID NO: 171312 - DNA, 17 bp, Arabidopsis thaliana
acccgaaagatggtgaa

SEQ ID NO: 171313 - DNA, 17 bp, Arabidopsis thaliana
acccgaaccagtgttcc

SEQ ID NO: 171314 - DNA, 17 bp, Arabidopsis thaliana
acccgatttcggagtag

SEQ ID NO: 171315 - DNA, 17 bp, Arabidopsis thaliana
acccgcaggattgtgag

SEQ ID NO: 171316 - DNA, 17 bp, Arabidopsis thaliana
acccggaaccagagcat

SEQ ID NO: 171317 - DNA, 17 bp, Arabidopsis thaliana
acccggacgcagcagga

SEQ ID NO: 171318 - DNA, 17 bp, Arabidopsis thaliana
acccgggcgaagccacc

SEQ ID NO: 171319 - DNA, 17 bp, Arabidopsis thaliana
accctactgatgacctc

SEQ ID NO: 171320 - DNA, 17 bp, Arabidopsis thaliana
accctactgatgcccgc

SEQ ID NO: 171321 - DNA, 17 bp, Arabidopsis thaliana
accctactgatgtccgc

SEQ ID NO: 171322 - DNA, 17 bp, Arabidopsis thaliana
accctatggacctgagc

SEQ ID NO: 171323 - DNA, 17 bp, Arabidopsis thaliana
accctattgattcccaa

SEQ ID NO: 171324 - DNA, 17 bp, Arabidopsis thaliana
accctggaaacggctca

SEQ ID NO: 171325 - DNA, 17 bp, Arabidopsis thaliana
accctttttgtctctct

SEQ ID NO: 171326 - DNA, 17 bp, Arabidopsis thaliana
accgacgcggattacgg

SEQ ID NO: 171327 - DNA, 17 bp, Arabidopsis thaliana
accgacgcggattgcgg

SEQ ID NO: 171328 - DNA, 17 bp, Arabidopsis thaliana
accgacttttcatcaca

SEQ ID NO: 171329 - DNA, 17 bp, Arabidopsis thaliana
accgaggaggcttgcgg

SEQ ID NO: 171330 - DNA, 17 bp, Arabidopsis thaliana
accgagtgccgctcacg

SEQ ID NO: 171331 - DNA, 17 bp, Arabidopsis thaliana
accgatagtggcaaaaa

SEQ ID NO: 171332 - DNA, 17 bp, Arabidopsis thaliana
accgatagtggcaaaag

SEQ ID NO: 171333 - DNA, 17 bp, Arabidopsis thaliana
accgatcaagcgttgca

SEQ ID NO: 171334 - DNA, 17 bp, Arabidopsis thaliana
accgattgaatgattca

SEQ ID NO: 171335 - DNA, 17 bp, Arabidopsis thaliana
accgatttatctgcaac

SEQ ID NO: 171336 - DNA, 17 bp, Arabidopsis thaliana
accgcaagagttgcagc

SEQ ID NO: 171337 - DNA, 17 bp, Arabidopsis thaliana
accgcaggagacaacta

SEQ ID NO: 171338 - DNA, 17 bp, Arabidopsis thaliana
accgcaggagacaactt

SEQ ID NO: 171339 - DNA, 17 bp, Arabidopsis thaliana
accgcatcaggtctcca

SEQ ID NO: 171340 - DNA, 17 bp, Arabidopsis thaliana
accgcccgtcgctacta

SEQ ID NO: 171341 - DNA, 17 bp, Arabidopsis thaliana
accgcccgtcgctccta

SEQ ID NO: 171342 - DNA, 17 bp, Arabidopsis thaliana
accgcggctgctggcac

SEQ ID NO: 171343 - DNA, 17 bp, Arabidopsis thaliana
accgctacactgcttat

SEQ ID NO: 171344 - DNA, 17 bp, Arabidopsis thaliana
accgctcaatgcaccag

SEQ ID NO: 171345 - DNA, 17 bp, Arabidopsis thaliana
accggaaccttttctgg

SEQ ID NO: 171346 - DNA, 17 bp, Arabidopsis thaliana
accggaagccgggttac

SEQ ID NO: 171347 - DNA, 17 bp, Arabidopsis thaliana
accggccgggggcttcc

SEQ ID NO: 171348 - DNA, 17 bp, Arabidopsis thaliana
accggcggcactaatgg

SEQ ID NO: 171349 - DNA, 17 bp, Arabidopsis thaliana
accgggccagcacacag

SEQ ID NO: 171350 - DNA, 17 bp, Arabidopsis thaliana
accgtagggttgtcgac

SEQ ID NO: 171351 - DNA, 17 bp, Arabidopsis thaliana
accgtcaaacggaagcc

SEQ ID NO: 171352 - DNA, 17 bp, Arabidopsis thaliana
accgtcaatgagcagcc

SEQ ID NO: 171353 - DNA, 17 bp, Arabidopsis thaliana
accgtcctatactgagt

SEQ ID NO: 171354 - DNA, 17 bp, Arabidopsis thaliana
accgtgaaagcgtggca

SEQ ID NO: 171355 - DNA, 17 bp, Arabidopsis thaliana
accgtgaaagcgtggcc

SEQ ID NO: 171356 - DNA, 17 bp, Arabidopsis thaliana
accgtgtccgcgacaag

SEQ ID NO: 171357 - DNA, 17 bp, Arabidopsis thaliana
accgttgattcgcacaa

SEQ ID NO: 171358 - DNA, 17 bp, Arabidopsis thaliana
accgtttggacctgccg

SEQ ID NO: 171359 - DNA, 17 bp, Arabidopsis thaliana
acctatgccctcaccga

SEQ ID NO: 171360 - DNA, 17 bp, Arabidopsis thaliana
acctcagcctgctaaca

SEQ ID NO: 171361 - DNA, 17 bp, Arabidopsis thaliana
acctcagcctgctaact

SEQ ID NO: 171362 - DNA, 17 bp, Arabidopsis thaliana
acctcctggttagtgcg

SEQ ID NO: 171363 - DNA, 17 bp, Arabidopsis thaliana
acctctgctgctgctat

SEQ ID NO: 171364 - DNA, 17 bp, Arabidopsis thaliana
acctgcggaaggatcat

SEQ ID NO: 171365 - DNA, 17 bp, Arabidopsis thaliana
acctggttgccgacgcc

SEQ ID NO: 171366 - DNA, 17 bp, Arabidopsis thaliana
acctgtgcaaatattgt

SEQ ID NO: 171367 - DNA, 17 bp, Arabidopsis thaliana
accttcctaaccaaact

SEQ ID NO: 171368 - DNA, 17 bp, Arabidopsis thaliana
accttcgatgtcggctc

SEQ ID NO: 171369 - DNA, 17 bp, Arabidopsis thaliana
accttgcaccatcagag

SEQ ID NO: 171370 - DNA, 17 bp, Arabidopsis thaliana
accttggaagaaaactt

SEQ ID NO: 171371 - DNA, 17 bp, Arabidopsis thaliana
accttggaatgggtcga

SEQ ID NO: 171372 - DNA, 17 bp, Arabidopsis thaliana
accttggaatgggtcgg

SEQ ID NO: 171373 - DNA, 17 bp, Arabidopsis thaliana
accttgggatgggtcga

SEQ ID NO: 171374 - DNA, 17 bp, Arabidopsis thaliana
accttgggatgggtcgg

SEQ ID NO: 171375 - DNA, 17 bp, Arabidopsis thaliana
accttgtgttaggacca

SEQ ID NO: 171376 - DNA, 17 bp, Arabidopsis thaliana
accttgtgttaggacct

SEQ ID NO: 171377 - DNA, 17 bp, Arabidopsis thaliana
acctttggatcatctca

SEQ ID NO: 171378 - DNA, 17 bp, Arabidopsis thaliana
acctttgtcttgcagta

SEQ ID NO: 171379 - DNA, 17 bp, Arabidopsis thaliana
acgaaaggagaagcgga

SEQ ID NO: 171380 - DNA, 17 bp, Arabidopsis thaliana
acgaagacgatggtggt

SEQ ID NO: 171381 - DNA, 17 bp, Arabidopsis thaliana
acgaaggttactattgg

SEQ ID NO: 171382 - DNA, 17 bp, Arabidopsis thaliana
acgaatgcgcattttga

SEQ ID NO: 171383 - DNA, 17 bp, Arabidopsis thaliana
acgacgagatgatcaaa

SEQ ID NO: 171384 - DNA, 17 bp, Arabidopsis thaliana
acgacgatttgtgacac

SEQ ID NO: 171385 - DNA, 17 bp, Arabidopsis thaliana
acgactctcggcaacga

SEQ ID NO: 171386 - DNA, 17 bp, Arabidopsis thaliana
acgactctcggcaacgg

SEQ ID NO: 171387 - DNA, 17 bp, Arabidopsis thaliana
acgagatattggtgcgg

SEQ ID NO: 171388 - DNA, 17 bp, Arabidopsis thaliana
acgaggatccattggag

SEQ ID NO: 171389 - DNA, 17 bp, Arabidopsis thaliana
acgaggtcttgaccgtc

SEQ ID NO: 171390 - DNA, 17 bp, Arabidopsis thaliana
acgagtcgccgcctgag

SEQ ID NO: 171391 - DNA, 17 bp, Arabidopsis thaliana
acgagtttggacagatg

SEQ ID NO: 171392 - DNA, 17 bp, Arabidopsis thaliana
acgatatcttccatttc

SEQ ID NO: 171393 - DNA, 17 bp, Arabidopsis thaliana
acgatccactgagattc

SEQ ID NO: 171394 - DNA, 17 bp, Arabidopsis thaliana
acgatgccgaccaggca

SEQ ID NO: 171395 - DNA, 17 bp, Arabidopsis thaliana
acgatgccgaccaggga

SEQ ID NO: 171396 - DNA, 17 bp, Arabidopsis thaliana
acgatgttcaatagata

SEQ ID NO: 171397 - DNA, 17 bp, Arabidopsis thaliana
acgattagcgccgcgac

SEQ ID NO: 171398 - DNA, 17 bp, Arabidopsis thaliana
acgattcactgagattc

SEQ ID NO: 171399 - DNA, 17 bp, Arabidopsis thaliana
acgattcccgctatccg

SEQ ID NO: 171400 - DNA, 17 bp, Arabidopsis thaliana
acgcaagttgcgcccca

SEQ ID NO: 171401 - DNA, 17 bp, Arabidopsis thaliana
acgcaatgtgatttctg

SEQ ID NO: 171402 - DNA, 17 bp, Arabidopsis thaliana
acgcacactgatgctga

SEQ ID NO: 171403 - DNA, 17 bp, Arabidopsis thaliana
acgcatcctgtagatgg

SEQ ID NO: 171404 - DNA, 17 bp, Arabidopsis thaliana
acgcattaaccaggaga

SEQ ID NO: 171405 - DNA, 17 bp, Arabidopsis thaliana
acgcattaaccaggagg

SEQ ID NO: 171406 - DNA, 17 bp, Arabidopsis thaliana
acgcattgccctccact

SEQ ID NO: 171407 - DNA, 17 bp, Arabidopsis thaliana
acgccgaccagcaggcc

SEQ ID NO: 171408 - DNA, 17 bp, Arabidopsis thaliana
acgcctagtcgatgttt

SEQ ID NO: 171409 - DNA, 17 bp, Arabidopsis thaliana
acgcctctaagtcagaa

SEQ ID NO: 171410 - DNA, 17 bp, Arabidopsis thaliana
acgcgacggggcggagt

SEQ ID NO: 171411 - DNA, 17 bp, Arabidopsis thaliana
acgcgacggggtattgt

SEQ ID NO: 171412 - DNA, 17 bp, Arabidopsis thaliana
acgcggagacggcggcg

SEQ ID NO: 171413 - DNA, 17 bp, Arabidopsis thaliana
acgcggattacggtggc

SEQ ID NO: 171414 - DNA, 17 bp, Arabidopsis thaliana
acgcggttggcctaaat

SEQ ID NO: 171415 - DNA, 17 bp, Arabidopsis thaliana
acgctaagtggcataca

SEQ ID NO: 171416 - DNA, 17 bp, Arabidopsis thaliana
acgctaagtggcatacg

SEQ ID NO: 171417 - DNA, 17 bp, Arabidopsis thaliana
acgctacattaagaatt

SEQ ID NO: 171418 - DNA, 17 bp, Arabidopsis thaliana
acgctactgtttccgac

SEQ ID NO: 171419 - DNA, 17 bp, Arabidopsis thaliana
acgctcaggagggatag

SEQ ID NO: 171420 - DNA, 17 bp, Arabidopsis thaliana
acgctctccagtaacaa

SEQ ID NO: 171421 - DNA, 17 bp, Arabidopsis thaliana
acgctgttttgcaaaac

SEQ ID NO: 171422 - DNA, 17 bp, Arabidopsis thaliana
acgcttccgccgaacgg

SEQ ID NO: 171423 - DNA, 17 bp, Arabidopsis thaliana
acggaaccgcggtgccc

SEQ ID NO: 171424 - DNA, 17 bp, Arabidopsis thaliana
acggaagggcaccacca

SEQ ID NO: 171425 - DNA, 17 bp, Arabidopsis thaliana
acggaatattgttgtga

SEQ ID NO: 171426 - DNA, 17 bp, Arabidopsis thaliana
acggactgggaacggct

SEQ ID NO: 171427 - DNA, 17 bp, Arabidopsis thaliana
acggatgtgctgtcaca

SEQ ID NO: 171428 - DNA, 17 bp, Arabidopsis thaliana
acggcagcgacgtctcc

SEQ ID NO: 171429 - DNA, 17 bp, Arabidopsis thaliana
acggcaggtccaaacgg

SEQ ID NO: 171430 - DNA, 17 bp, Arabidopsis thaliana
acggcatgttcaacgaa

SEQ ID NO: 171431 - DNA, 17 bp, Arabidopsis thaliana
acggccggcttcttaga

SEQ ID NO: 171432 - DNA, 17 bp, Arabidopsis thaliana
acggcgagcgaaccggg

SEQ ID NO: 171433 - DNA, 17 bp, Arabidopsis thaliana
acggcggtctgacaggt

SEQ ID NO: 171434 - DNA, 17 bp, Arabidopsis thaliana
acggctagacggtaaga

SEQ ID NO: 171435 - DNA, 17 bp, Arabidopsis thaliana
acggctcagccggaggt

SEQ ID NO: 171436 - DNA, 17 bp, Arabidopsis thaliana
acgggaccgaggctggt

SEQ ID NO: 171437 - DNA, 17 bp, Arabidopsis thaliana
acgggatcccgtccgct

SEQ ID NO: 171438 - DNA, 17 bp, Arabidopsis thaliana
acgggcacataccaaga

SEQ ID NO: 171439 - DNA, 17 bp, Arabidopsis thaliana
acgggcttgccagaatc

SEQ ID NO: 171440 - DNA, 17 bp, Arabidopsis thaliana
acggggaaacttaccag

SEQ ID NO: 171441 - DNA, 17 bp, Arabidopsis thaliana
acggggatcgttacccc

SEQ ID NO: 171442 - DNA, 17 bp, Arabidopsis thaliana
acggggtggggcttgta

SEQ ID NO: 171443 - DNA, 17 bp, Arabidopsis thaliana
acggtatctctcctacg

SEQ ID NO: 171444 - DNA, 17 bp, Arabidopsis thaliana
acggtatctcttctacg

SEQ ID NO: 171445 - DNA, 17 bp, Arabidopsis thaliana
acggtgttattgctgag

SEQ ID NO: 171446 - DNA, 17 bp, Arabidopsis thaliana
acggttgggtttgattc

SEQ ID NO: 171447 - DNA, 17 bp, Arabidopsis thaliana
acggtttcccggcgatt

SEQ ID NO: 171448 - DNA, 17 bp, Arabidopsis thaliana
acgtaaaactacgattt

SEQ ID NO: 171449 - DNA, 17 bp, Arabidopsis thaliana
acgtccctgccctttgt

SEQ ID NO: 171450 - DNA, 17 bp, Arabidopsis thaliana
acgtccttcgcgggcgg

SEQ ID NO: 171451 - DNA, 17 bp, Arabidopsis thaliana
acgtcgcgagaagtcca

SEQ ID NO: 171452 - DNA, 17 bp, Arabidopsis thaliana
acgtcgcgggcggcgaa

SEQ ID NO: 171453 - DNA, 17 bp, Arabidopsis thaliana
acgtctaagcaagcaat

SEQ ID NO: 171454 - DNA, 17 bp, Arabidopsis thaliana
acgtctacaaaaaagtt

SEQ ID NO: 171455 - DNA, 17 bp, Arabidopsis thaliana
acgtctgcctgggtgcc

SEQ ID NO: 171456 - DNA, 17 bp, Arabidopsis thaliana
acgtctgcctgggtgtc

SEQ ID NO: 171457 - DNA, 17 bp, Arabidopsis thaliana
acgtctgcctggtgtca

SEQ ID NO: 171458 - DNA, 17 bp, Arabidopsis thaliana
acgtctgcttgggtgtc

SEQ ID NO: 171459 - DNA, 17 bp, Arabidopsis thaliana
acgtcttgcagctgcct

SEQ ID NO: 171460 - DNA, 17 bp, Arabidopsis thaliana
acgtctttggcctcaag

SEQ ID NO: 171461 - DNA, 17 bp, Arabidopsis thaliana
acgtgagctgggtttag

SEQ ID NO: 171462 - DNA, 17 bp, Arabidopsis thaliana
acgtgctacaatggccg

SEQ ID NO: 171463 - DNA, 17 bp, Arabidopsis thaliana
acgtgtcgttggctaag

SEQ ID NO: 171464 - DNA, 17 bp, Arabidopsis thaliana
acgttaatgaacaaaga

SEQ ID NO: 171465 - DNA, 17 bp, Arabidopsis thaliana
acgttctaagaagaaag

SEQ ID NO: 171466 - DNA, 17 bp, Arabidopsis thaliana
acgttggttaccgtaat

SEQ ID NO: 171467 - DNA, 17 bp, Arabidopsis thaliana
acgttgtttaccgtaat

SEQ ID NO: 171468 - DNA, 17 bp, Arabidopsis thaliana
acgtttactatgctgcc

SEQ ID NO: 171469 - DNA, 17 bp, Arabidopsis thaliana
acgtttctatactttga

SEQ ID NO: 171470 - DNA, 17 bp, Arabidopsis thaliana
acgttttctcagatgca

SEQ ID NO: 171471 - DNA, 17 bp, Arabidopsis thaliana
actaagaacctaacaga

SEQ ID NO: 171472 - DNA, 17 bp, Arabidopsis thaliana
actaagattctgtgaac

SEQ ID NO: 171473 - DNA, 17 bp, Arabidopsis thaliana
actaagcagatttctca

SEQ ID NO: 171474 - DNA, 17 bp, Arabidopsis thaliana
actaaggtgtttttctt

SEQ ID NO: 171475 - DNA, 17 bp, Arabidopsis thaliana
actacaaatctgcttac

SEQ ID NO: 171476 - DNA, 17 bp, Arabidopsis thaliana
actacaaatgtatccgc

SEQ ID NO: 171477 - DNA, 17 bp, Arabidopsis thaliana
actacattcccgcttta

SEQ ID NO: 171478 - DNA, 17 bp, Arabidopsis thaliana
actactattgtttcgtg

SEQ ID NO: 171479 - DNA, 17 bp, Arabidopsis thaliana
actactgcacgggcttg

SEQ ID NO: 171480 - DNA, 17 bp, Arabidopsis thaliana
actactggttttggtgc

SEQ ID NO: 171481 - DNA, 17 bp, Arabidopsis thaliana
actacttgcgtgccttg

SEQ ID NO: 171482 - DNA, 17 bp, Arabidopsis thaliana
actacttgtccaacagc

SEQ ID NO: 171483 - DNA, 17 bp, Arabidopsis thaliana
actaggatgggtgacct

SEQ ID NO: 171484 - DNA, 17 bp, Arabidopsis thaliana
actagggatcgggtggt

SEQ ID NO: 171485 - DNA, 17 bp, Arabidopsis thaliana
actaggtgcaccagtgc

SEQ ID NO: 171486 - DNA, 17 bp, Arabidopsis thaliana
actagtaagggaccaac

SEQ ID NO: 171487 - DNA, 17 bp, Arabidopsis thaliana
actagtactcaggtggg

SEQ ID NO: 171488 - DNA, 17 bp, Arabidopsis thaliana
actagtggcttaaacaa

SEQ ID NO: 171489 - DNA, 17 bp, Arabidopsis thaliana
actatacgagatcttct

SEQ ID NO: 171490 - DNA, 17 bp, Arabidopsis thaliana
actatcgtcaggggcaa

SEQ ID NO: 171491 - DNA, 17 bp, Arabidopsis thaliana
actatctatgactgtgc

SEQ ID NO: 171492 - DNA, 17 bp, Arabidopsis thaliana
actatgactctcttaag

SEQ ID NO: 171493 - DNA, 17 bp, Arabidopsis thaliana
actatgcctgagcgggg

SEQ ID NO: 171494 - DNA, 17 bp, Arabidopsis thaliana
actatggcctgctggtc

SEQ ID NO: 171495 - DNA, 17 bp, Arabidopsis thaliana
actatttccatcttcga

SEQ ID NO: 171496 - DNA, 17 bp, Arabidopsis thaliana
actattttttgtttttt

SEQ ID NO: 171497 - DNA, 17 bp, Arabidopsis thaliana
actcaaacatgtgcttg

SEQ ID NO: 171498 - DNA, 17 bp, Arabidopsis thaliana
actcaacggaatattga

SEQ ID NO: 171499 - DNA, 17 bp, Arabidopsis thaliana
actcaacggaatattgt

SEQ ID NO: 171500 - DNA, 17 bp, Arabidopsis thaliana
actcagtgatatgattg

SEQ ID NO: 171501 - DNA, 17 bp, Arabidopsis thaliana
actcataagatcgtgac

SEQ ID NO: 171502 - DNA, 17 bp, Arabidopsis thaliana
actcatcatcgagcgta

SEQ ID NO: 171503 - DNA, 17 bp, Arabidopsis thaliana
actcattttcgacggca

SEQ ID NO: 171504 - DNA, 17 bp, Arabidopsis thaliana
actccaactgagccacc

SEQ ID NO: 171505 - DNA, 17 bp, Arabidopsis thaliana
actccaactgagccatc

SEQ ID NO: 171506 - DNA, 17 bp, Arabidopsis thaliana
actccaaggcatttgca

SEQ ID NO: 171507 - DNA, 17 bp, Arabidopsis thaliana
actccatgacccgctgg

SEQ ID NO: 171508 - DNA, 17 bp, Arabidopsis thaliana
actcccggcagacgcac

SEQ ID NO: 171509 - DNA, 17 bp, Arabidopsis thaliana
actccgcagttaagcgt

SEQ ID NO: 171510 - DNA, 17 bp, Arabidopsis thaliana
actcctggtggtgccct

SEQ ID NO: 171511 - DNA, 17 bp, Arabidopsis thaliana
actcgaatacaaccata

SEQ ID NO: 171512 - DNA, 17 bp, Arabidopsis thaliana
actcgaatacaaccatt

SEQ ID NO: 171513 - DNA, 17 bp, Arabidopsis thaliana
actcgacggatcgcatg

SEQ ID NO: 171514 - DNA, 17 bp, Arabidopsis thaliana
actcgagaagtgcgttg

SEQ ID NO: 171515 - DNA, 17 bp, Arabidopsis thaliana
actcgagctggctctgg

SEQ ID NO: 171516 - DNA, 17 bp, Arabidopsis thaliana
actcgcaggtgcagggt

SEQ ID NO: 171517 - DNA, 17 bp, Arabidopsis thaliana
actcggccaaattgtcg

SEQ ID NO: 171518 - DNA, 17 bp, Arabidopsis thaliana
actcgtcttctggatca

SEQ ID NO: 171519 - DNA, 17 bp, Arabidopsis thaliana
actcgtgaacttagcca

SEQ ID NO: 171520 - DNA, 17 bp, Arabidopsis thaliana
actcgttccaactaatg

SEQ ID NO: 171521 - DNA, 17 bp, Arabidopsis thaliana
actctactgcggtgacg

SEQ ID NO: 171522 - DNA, 17 bp, Arabidopsis thaliana
actctactgcggtggcg

SEQ ID NO: 171523 - DNA, 17 bp, Arabidopsis thaliana
actctcaaaatgattgt

SEQ ID NO: 171524 - DNA, 17 bp, Arabidopsis thaliana
actctcatctacctttg

SEQ ID NO: 171525 - DNA, 17 bp, Arabidopsis thaliana
actctccaagggttcga

SEQ ID NO: 171526 - DNA, 17 bp, Arabidopsis thaliana
actctccgaaggttcga

SEQ ID NO: 171527 - DNA, 17 bp, Arabidopsis thaliana
actctccttgaggctct

SEQ ID NO: 171528 - DNA, 17 bp, Arabidopsis thaliana
actctcggtgggccggt

SEQ ID NO: 171529 - DNA, 17 bp, Arabidopsis thaliana
actctcttctgccagat

SEQ ID NO: 171530 - DNA, 17 bp, Arabidopsis thaliana
actctcttctgtcagat

SEQ ID NO: 171531 - DNA, 17 bp, Arabidopsis thaliana
actctcttttgtcagat

SEQ ID NO: 171532 - DNA, 17 bp, Arabidopsis thaliana
actctgaccgcctacgt

SEQ ID NO: 171533 - DNA, 17 bp, Arabidopsis thaliana
actctgatggtgcaagg

SEQ ID NO: 171534 - DNA, 17 bp, Arabidopsis thaliana
actctgctggccggtct

SEQ ID NO: 171535 - DNA, 17 bp, Arabidopsis thaliana
actctggtggaggctcg

SEQ ID NO: 171536 - DNA, 17 bp, Arabidopsis thaliana
actctgtggtgcttctc

SEQ ID NO: 171537 - DNA, 17 bp, Arabidopsis thaliana
actcttgcgggagaagc

SEQ ID NO: 171538 - DNA, 17 bp, Arabidopsis thaliana
actcttgcgggaggagc

SEQ ID NO: 171539 - DNA, 17 bp, Arabidopsis thaliana
actgaacgcctctaaga

SEQ ID NO: 171540 - DNA, 17 bp, Arabidopsis thaliana
actgaaggagtaaataa

SEQ ID NO: 171541 - DNA, 17 bp, Arabidopsis thaliana
actgaattgtcaacgtc

SEQ ID NO: 171542 - DNA, 17 bp, Arabidopsis thaliana
actgacaaatccggtga

SEQ ID NO: 171543 - DNA, 17 bp, Arabidopsis thaliana
actgacacagccagcga

SEQ ID NO: 171544 - DNA, 17 bp, Arabidopsis thaliana
actgaccagcaaataca

SEQ ID NO: 171545 - DNA, 17 bp, Arabidopsis thaliana
actgactggtgggagga

SEQ ID NO: 171546 - DNA, 17 bp, Arabidopsis thaliana
actgagattcagccctt

SEQ ID NO: 171547 - DNA, 17 bp, Arabidopsis thaliana
actgagattcagctctt

SEQ ID NO: 171548 - DNA, 17 bp, Arabidopsis thaliana
actgagggtcggcaatc

SEQ ID NO: 171549 - DNA, 17 bp, Arabidopsis thaliana
actgatatgatcaaaac

SEQ ID NO: 171550 - DNA, 17 bp, Arabidopsis thaliana
actgatgatcaaaacaa

SEQ ID NO: 171551 - DNA, 17 bp, Arabidopsis thaliana
actgatgatgctgaccg

SEQ ID NO: 171552 - DNA, 17 bp, Arabidopsis thaliana
actgatgatggccttgt

SEQ ID NO: 171553 - DNA, 17 bp, Arabidopsis thaliana
actgcaacctggtccgc

SEQ ID NO: 171554 - DNA, 17 bp, Arabidopsis thaliana
actgcaagaaccgcctg

SEQ ID NO: 171555 - DNA, 17 bp, Arabidopsis thaliana
actgcacgggtcgatac

SEQ ID NO: 171556 - DNA, 17 bp, Arabidopsis thaliana
actgcagcgctcgctcg

SEQ ID NO: 171557 - DNA, 17 bp, Arabidopsis thaliana
actgcaggctcaggtgg

SEQ ID NO: 171558 - DNA, 17 bp, Arabidopsis thaliana
actgcccgtcgctccta

SEQ ID NO: 171559 - DNA, 17 bp, Arabidopsis thaliana
actgcgaaagcatttga

SEQ ID NO: 171560 - DNA, 17 bp, Arabidopsis thaliana
actgcgaaagcatttgc

SEQ ID NO: 171561 - DNA, 17 bp, Arabidopsis thaliana
actgcgggtagctggga

SEQ ID NO: 171562 - DNA, 17 bp, Arabidopsis thaliana
actgcgtggtaactggt

SEQ ID NO: 171563 - DNA, 17 bp, Arabidopsis thaliana
actgctgagagcgggag

SEQ ID NO: 171564 - DNA, 17 bp, Arabidopsis thaliana
actggactgggaggtca

SEQ ID NO: 171565 - DNA, 17 bp, Arabidopsis thaliana
actggcggaggcggagg

SEQ ID NO: 171566 - DNA, 17 bp, Arabidopsis thaliana
actggcttgtggcagcc

SEQ ID NO: 171567 - DNA, 17 bp, Arabidopsis thaliana
actggcttttcaaccaa

SEQ ID NO: 171568 - DNA, 17 bp, Arabidopsis thaliana
actgggaacggctctct

SEQ ID NO: 171569 - DNA, 17 bp, Arabidopsis thaliana
actgggaccaaccatca

SEQ ID NO: 171570 - DNA, 17 bp, Arabidopsis thaliana
actggtaaatgggatga

SEQ ID NO: 171571 - DNA, 17 bp, Arabidopsis thaliana
actggtaaatgggatgg

SEQ ID NO: 171572 - DNA, 17 bp, Arabidopsis thaliana
actggtaatctcttcct

SEQ ID NO: 171573 - DNA, 17 bp, Arabidopsis thaliana
actggtaccaacggtat

SEQ ID NO: 171574 - DNA, 17 bp, Arabidopsis thaliana
actggtacggacaaggg

SEQ ID NO: 171575 - DNA, 17 bp, Arabidopsis thaliana
actgtagatggatcgtc

SEQ ID NO: 171576 - DNA, 17 bp, Arabidopsis thaliana
actgtcatggggtatga

SEQ ID NO: 171577 - DNA, 17 bp, Arabidopsis thaliana
actgtgaaactgcgaat

SEQ ID NO: 171578 - DNA, 17 bp, Arabidopsis thaliana
actgtgtggtaactggt

SEQ ID NO: 171579 - DNA, 17 bp, Arabidopsis thaliana
actgtgttgccaactaa

SEQ ID NO: 171580 - DNA, 17 bp, Arabidopsis thaliana
actgtgttgctaactaa

SEQ ID NO: 171581 - DNA, 17 bp, Arabidopsis thaliana
actgttaagactaacca

SEQ ID NO: 171582 - DNA, 17 bp, Arabidopsis thaliana
actgttatccctctcat

SEQ ID NO: 171583 - DNA, 17 bp, Arabidopsis thaliana
actgttccctgggattg

SEQ ID NO: 171584 - DNA, 17 bp, Arabidopsis thaliana
actgttctttagacgac

SEQ ID NO: 171585 - DNA, 17 bp, Arabidopsis thaliana
acttacggattccatcc

SEQ ID NO: 171586 - DNA, 17 bp, Arabidopsis thaliana
acttagattgttcttag

SEQ ID NO: 171587 - DNA, 17 bp, Arabidopsis thaliana
acttagctgtgcgaaag

SEQ ID NO: 171588 - DNA, 17 bp, Arabidopsis thaliana
acttagtcgatcctgta

SEQ ID NO: 171589 - DNA, 17 bp, Arabidopsis thaliana
acttagtcgcatcctga

SEQ ID NO: 171590 - DNA, 17 bp, Arabidopsis thaliana
acttagtcgcatcctgt

SEQ ID NO: 171591 - DNA, 17 bp, Arabidopsis thaliana
acttatggaagggacga

SEQ ID NO: 171592 - DNA, 17 bp, Arabidopsis thaliana
acttattaagcttacaa

SEQ ID NO: 171593 - DNA, 17 bp, Arabidopsis thaliana
acttccccggtactctt

SEQ ID NO: 171594 - DNA, 17 bp, Arabidopsis thaliana
acttccggagcaccgac

SEQ ID NO: 171595 - DNA, 17 bp, Arabidopsis thaliana
acttccttcagttcgga

SEQ ID NO: 171596 - DNA, 17 bp, Arabidopsis thaliana
acttcgtcgtacagact

SEQ ID NO: 171597 - DNA, 17 bp, Arabidopsis thaliana
acttctcgaatcgcacg

SEQ ID NO: 171598 - DNA, 17 bp, Arabidopsis thaliana
acttctgcctgggtgtc

SEQ ID NO: 171599 - DNA, 17 bp, Arabidopsis thaliana
acttctggacgaagcaa

SEQ ID NO: 171600 - DNA, 17 bp, Arabidopsis thaliana
acttctggtcgaccatt

SEQ ID NO: 171601 - DNA, 17 bp, Arabidopsis thaliana
acttgacacttttcgtg

SEQ ID NO: 171602 - DNA, 17 bp, Arabidopsis thaliana
acttgacacttttcttg

SEQ ID NO: 171603 - DNA, 17 bp, Arabidopsis thaliana
acttgagcgatccatct

SEQ ID NO: 171604 - DNA, 17 bp, Arabidopsis thaliana
acttgatcgctcaaagt

SEQ ID NO: 171605 - DNA, 17 bp, Arabidopsis thaliana
acttgcgcgatgtgctc

SEQ ID NO: 171606 - DNA, 17 bp, Arabidopsis thaliana
acttgcttcatgtagac

SEQ ID NO: 171607 - DNA, 17 bp, Arabidopsis thaliana
acttgggatgggtcggc

SEQ ID NO: 171608 - DNA, 17 bp, Arabidopsis thaliana
acttggtacccaacagg

SEQ ID NO: 171609 - DNA, 17 bp, Arabidopsis thaliana
acttgtatgtatgattt

SEQ ID NO: 171610 - DNA, 17 bp, Arabidopsis thaliana
acttgtctctgcaagga

SEQ ID NO: 171611 - DNA, 17 bp, Arabidopsis thaliana
acttgtgaaggagttca

SEQ ID NO: 171612 - DNA, 17 bp, Arabidopsis thaliana
actttacggtgggagat

SEQ ID NO: 171613 - DNA, 17 bp, Arabidopsis thaliana
actttagcgaaaccaca

SEQ ID NO: 171614 - DNA, 17 bp, Arabidopsis thaliana
actttcaactcattgat

SEQ ID NO: 171615 - DNA, 17 bp, Arabidopsis thaliana
actttcaatgcattgag

SEQ ID NO: 171616 - DNA, 17 bp, Arabidopsis thaliana
actttcaggaagttgat

SEQ ID NO: 171617 - DNA, 17 bp, Arabidopsis thaliana
actttcgatggtaggat

SEQ ID NO: 171618 - DNA, 17 bp, Arabidopsis thaliana
actttctaagatccacc

SEQ ID NO: 171619 - DNA, 17 bp, Arabidopsis thaliana
actttgaagctttgatt

SEQ ID NO: 171620 - DNA, 17 bp, Arabidopsis thaliana
actttgaaggccgaaga

SEQ ID NO: 171621 - DNA, 17 bp, Arabidopsis thaliana
actttgagagatcaagt

SEQ ID NO: 171622 - DNA, 17 bp, Arabidopsis thaliana
actttgtatcgcgcaca

SEQ ID NO: 171623 - DNA, 17 bp, Arabidopsis thaliana
actttgtcgagtcacca

SEQ ID NO: 171624 - DNA, 17 bp, Arabidopsis thaliana
actttgtggactatgaa

SEQ ID NO: 171625 - DNA, 17 bp, Arabidopsis thaliana
actttgttactggagaa

SEQ ID NO: 171626 - DNA, 17 bp, Arabidopsis thaliana
acttttcaaaactggtt

SEQ ID NO: 171627 - DNA, 17 bp, Arabidopsis thaliana
acttttggggtgctaag

SEQ ID NO: 171628 - DNA, 17 bp, Arabidopsis thaliana
acttttgtggactatga

SEQ ID NO: 171629 - DNA, 17 bp, Arabidopsis thaliana
actttttattcaggtct

SEQ ID NO: 171630 - DNA, 17 bp, Arabidopsis thaliana
actttttctactatcca

SEQ ID NO: 171631 - DNA, 17 bp, Arabidopsis thaliana
actttttctactatcct

SEQ ID NO: 171632 - DNA, 17 bp, Arabidopsis thaliana
acttttttgtagacgtt

SEQ ID NO: 171633 - DNA, 17 bp, Arabidopsis thaliana
actttttttttcttttg

SEQ ID NO: 171634 - DNA, 17 bp, Arabidopsis thaliana
agaaaacctagttgcta

SEQ ID NO: 171635 - DNA, 17 bp, Arabidopsis thaliana
agaaaacttagcccatt

SEQ ID NO: 171636 - DNA, 17 bp, Arabidopsis thaliana
agaaaactttctggaga

SEQ ID NO: 171637 - DNA, 17 bp, Arabidopsis thaliana
agaaaactttctggagg

SEQ ID NO: 171638 - DNA, 17 bp, Arabidopsis thaliana
agaaaactttctggata

SEQ ID NO: 171639 - DNA, 17 bp, Arabidopsis thaliana
agaaaagatcaatgggt

SEQ ID NO: 171640 - DNA, 17 bp, Arabidopsis thaliana
agaaaaggttccggtgc

SEQ ID NO: 171641 - DNA, 17 bp, Arabidopsis thaliana
agaaaagtttgaaaaca

SEQ ID NO: 171642 - DNA, 17 bp, Arabidopsis thaliana
agaaacagagtgactgc

SEQ ID NO: 171643 - DNA, 17 bp, Arabidopsis thaliana
agaaacgctctccagta

SEQ ID NO: 171644 - DNA, 17 bp, Arabidopsis thaliana
agaaacgtgatggtggc

SEQ ID NO: 171645 - DNA, 17 bp, Arabidopsis thaliana
agaaactgaatgcccta

SEQ ID NO: 171646 - DNA, 17 bp, Arabidopsis thaliana
agaaacttgatgatgct

SEQ ID NO: 171647 - DNA, 17 bp, Arabidopsis thaliana
agaaagaatgtgagtta

SEQ ID NO: 171648 - DNA, 17 bp, Arabidopsis thaliana
agaaagatgaatcatca

SEQ ID NO: 171649 - DNA, 17 bp, Arabidopsis thaliana
agaaagtgactacatcg

SEQ ID NO: 171650 - DNA, 17 bp, Arabidopsis thaliana
agaaagtgactacattt

SEQ ID NO: 171651 - DNA, 17 bp, Arabidopsis thaliana
agaaagttgctgcgatt

SEQ ID NO: 171652 - DNA, 17 bp, Arabidopsis thaliana
agaaagttttctgatcc

SEQ ID NO: 171653 - DNA, 17 bp, Arabidopsis thaliana
agaaatcaaagtattta

SEQ ID NO: 171654 - DNA, 17 bp, Arabidopsis thaliana
agaaatcaaagtatttt

SEQ ID NO: 171655 - DNA, 17 bp, Arabidopsis thaliana
agaaatggatctgaaaa

SEQ ID NO: 171656 - DNA, 17 bp, Arabidopsis thaliana
agaaatggcgatgcatg

SEQ ID NO: 171657 - DNA, 17 bp, Arabidopsis thaliana
agaaattacgatttttg

SEQ ID NO: 171658 - DNA, 17 bp, Arabidopsis thaliana
agaaattgtacgacgag

SEQ ID NO: 171659 - DNA, 17 bp, Arabidopsis thaliana
agaacaccaggtagtga

SEQ ID NO: 171660 - DNA, 17 bp, Arabidopsis thaliana
agaacagttgctaataa

SEQ ID NO: 171661 - DNA, 17 bp, Arabidopsis thaliana
agaacagttgctaatac

SEQ ID NO: 171662 - DNA, 17 bp, Arabidopsis thaliana
agaacatcatttgtatg

SEQ ID NO: 171663 - DNA, 17 bp, Arabidopsis thaliana
agaacatgatcgtttgg

SEQ ID NO: 171664 - DNA, 17 bp, Arabidopsis thaliana
agaaccgagtgccgctc

SEQ ID NO: 171665 - DNA, 17 bp, Arabidopsis thaliana
agaaccgatccgaggaa

SEQ ID NO: 171666 - DNA, 17 bp, Arabidopsis thaliana
agaaccgcctgagccaa

SEQ ID NO: 171667 - DNA, 17 bp, Arabidopsis thaliana
agaaccggcccgtggac

SEQ ID NO: 171668 - DNA, 17 bp, Arabidopsis thaliana
agaaccttgacgatgca

SEQ ID NO: 171669 - DNA, 17 bp, Arabidopsis thaliana
agaaccttgacgatgct

SEQ ID NO: 171670 - DNA, 17 bp, Arabidopsis thaliana
agaaccttgatgatgca

SEQ ID NO: 171671 - DNA, 17 bp, Arabidopsis thaliana
agaaccttgatgatgct

SEQ ID NO: 171672 - DNA, 17 bp, Arabidopsis thaliana
agaacggccatgcacca

SEQ ID NO: 171673 - DNA, 17 bp, Arabidopsis thaliana
agaacggccattcacca

SEQ ID NO: 171674 - DNA, 17 bp, Arabidopsis thaliana
agaactgcctgaggaac

SEQ ID NO: 171675 - DNA, 17 bp, Arabidopsis thaliana
agaacttattggccttt

SEQ ID NO: 171676 - DNA, 17 bp, Arabidopsis thaliana
agaacttgatgatgctg

SEQ ID NO: 171677 - DNA, 17 bp, Arabidopsis thaliana
agaagaacctagtagag

SEQ ID NO: 171678 - DNA, 17 bp, Arabidopsis thaliana
agaagaagaagagcctc

SEQ ID NO: 171679 - DNA, 17 bp, Arabidopsis thaliana
agaagaaggtggtagac

SEQ ID NO: 171680 - DNA, 17 bp, Arabidopsis thaliana
agaagacacagtcagta

SEQ ID NO: 171681 - DNA, 17 bp, Arabidopsis thaliana
agaagacagaagatgaa

SEQ ID NO: 171682 - DNA, 17 bp, Arabidopsis thaliana
agaagacagaagtttgc

SEQ ID NO: 171683 - DNA, 17 bp, Arabidopsis thaliana
agaagagattacgcctg

SEQ ID NO: 171684 - DNA, 17 bp, Arabidopsis thaliana
agaagagggtagcggcg

SEQ ID NO: 171685 - DNA, 17 bp, Arabidopsis thaliana
agaagatcctaacaagc

SEQ ID NO: 171686 - DNA, 17 bp, Arabidopsis thaliana
agaagatctcgctcacc

SEQ ID NO: 171687 - DNA, 17 bp, Arabidopsis thaliana
agaagatgaaatctccg

SEQ ID NO: 171688 - DNA, 17 bp, Arabidopsis thaliana
agaagatgacagcgacg

SEQ ID NO: 171689 - DNA, 17 bp, Arabidopsis thaliana
agaagatgattcgtcaa

SEQ ID NO: 171690 - DNA, 17 bp, Arabidopsis thaliana
agaagattattgtcttg

SEQ ID NO: 171691 - DNA, 17 bp, Arabidopsis thaliana
agaagatttttcttgac

SEQ ID NO: 171692 - DNA, 17 bp, Arabidopsis thaliana
agaagcaaaatgacgaa

SEQ ID NO: 171693 - DNA, 17 bp, Arabidopsis thaliana
agaagcaaaatgacgac

SEQ ID NO: 171694 - DNA, 17 bp, Arabidopsis thaliana
agaagcccagatagcaa

SEQ ID NO: 171695 - DNA, 17 bp, Arabidopsis thaliana
agaagccggccgtgaag

SEQ ID NO: 171696 - DNA, 17 bp, Arabidopsis thaliana
agaagccgtttgagcca

SEQ ID NO: 171697 - DNA, 17 bp, Arabidopsis thaliana
agaagcgacgcatgcaa

SEQ ID NO: 171698 - DNA, 17 bp, Arabidopsis thaliana
agaagcgacgcatgcac

SEQ ID NO: 171699 - DNA, 17 bp, Arabidopsis thaliana
agaagcgacgcatgcgc

SEQ ID NO: 171700 - DNA, 17 bp, Arabidopsis thaliana
agaagcggttgagttcc

SEQ ID NO: 171701 - DNA, 17 bp, Arabidopsis thaliana
agaaggcccccttccgg

SEQ ID NO: 171702 - DNA, 17 bp, Arabidopsis thaliana
agaagggattgtaataa

SEQ ID NO: 171703 - DNA, 17 bp, Arabidopsis thaliana
agaaggtcgtgggttcg

SEQ ID NO: 171704 - DNA, 17 bp, Arabidopsis thaliana
agaagtacaaagatgcc

SEQ ID NO: 171705 - DNA, 17 bp, Arabidopsis thaliana
agaagtggaccatcaac

SEQ ID NO: 171706 - DNA, 17 bp, Arabidopsis thaliana
agaagttcttgcagcgt

SEQ ID NO: 171707 - DNA, 17 bp, Arabidopsis thaliana
agaataaaggctaatgt

SEQ ID NO: 171708 - DNA, 17 bp, Arabidopsis thaliana
agaataattttctaaga

SEQ ID NO: 171709 - DNA, 17 bp, Arabidopsis thaliana
agaatacgctatgttgg

SEQ ID NO: 171710 - DNA, 17 bp, Arabidopsis thaliana
agaatagaatctgtaaa

SEQ ID NO: 171711 - DNA, 17 bp, Arabidopsis thaliana
agaatagatatctatct

SEQ ID NO: 171712 - DNA, 17 bp, Arabidopsis thaliana
agaatatctcctcgatg

SEQ ID NO: 171713 - DNA, 17 bp, Arabidopsis thaliana
agaatcaaggcaagaaa

SEQ ID NO: 171714 - DNA, 17 bp, Arabidopsis thaliana
agaatcaaggcaagaat

SEQ ID NO: 171715 - DNA, 17 bp, Arabidopsis thaliana
agaatcacgatgatgct

SEQ ID NO: 171716 - DNA, 17 bp, Arabidopsis thaliana
agaatcagtacgctgac

SEQ ID NO: 171717 - DNA, 17 bp, Arabidopsis thaliana
agaatcatgatgatgct

SEQ ID NO: 171718 - DNA, 17 bp, Arabidopsis thaliana
agaatcccgtgaaccat

SEQ ID NO: 171719 - DNA, 17 bp, Arabidopsis thaliana
agaatccgcctgagtca

SEQ ID NO: 171720 - DNA, 17 bp, Arabidopsis thaliana
agaatcctgatgacgct

SEQ ID NO: 171721 - DNA, 17 bp, Arabidopsis thaliana
agaatcctgatgatgca

SEQ ID NO: 171722 - DNA, 17 bp, Arabidopsis thaliana
agaatcctgatgatgct

SEQ ID NO: 171723 - DNA, 17 bp, Arabidopsis thaliana
agaatcctttgcagaca

SEQ ID NO: 171724 - DNA, 17 bp, Arabidopsis thaliana
agaatcctttgcagacg

SEQ ID NO: 171725 - DNA, 17 bp, Arabidopsis thaliana
agaatcgcgaccttcaa

SEQ ID NO: 171726 - DNA, 17 bp, Arabidopsis thaliana
agaatcgtgatgatgct

SEQ ID NO: 171727 - DNA, 17 bp, Arabidopsis thaliana
agaatctagatgatgct

SEQ ID NO: 171728 - DNA, 17 bp, Arabidopsis thaliana
agaatctcatttgacac

SEQ ID NO: 171729 - DNA, 17 bp, Arabidopsis thaliana
agaatctcgacgatgct

SEQ ID NO: 171730 - DNA, 17 bp, Arabidopsis thaliana
agaatctcgatgatgct

SEQ ID NO: 171731 - DNA, 17 bp, Arabidopsis thaliana
agaatctgatgatgctg

SEQ ID NO: 171732 - DNA, 17 bp, Arabidopsis thaliana
agaatctggatgatgct

SEQ ID NO: 171733 - DNA, 17 bp, Arabidopsis thaliana
agaatcttaatgatgca

SEQ ID NO: 171734 - DNA, 17 bp, Arabidopsis thaliana
agaatcttatgatgcta

SEQ ID NO: 171735 - DNA, 17 bp, Arabidopsis thaliana
agaatcttatgatgctg

SEQ ID NO: 171736 - DNA, 17 bp, Arabidopsis thaliana
agaatcttcatgatgca

SEQ ID NO: 171737 - DNA, 17 bp, Arabidopsis thaliana
agaatcttcatgatgct

SEQ ID NO: 171738 - DNA, 17 bp, Arabidopsis thaliana
agaatcttgaagatgca

SEQ ID NO: 171739 - DNA, 17 bp, Arabidopsis thaliana
agaatcttgaagatgct

SEQ ID NO: 171740 - DNA, 17 bp, Arabidopsis thaliana
agaatcttgacgatgca

SEQ ID NO: 171741 - DNA, 17 bp, Arabidopsis thaliana
agaatcttgacgatgct

SEQ ID NO: 171742 - DNA, 17 bp, Arabidopsis thaliana
agaatcttgaggatgct

SEQ ID NO: 171743 - DNA, 17 bp, Arabidopsis thaliana
agaatcttgataatgca

SEQ ID NO: 171744 - DNA, 17 bp, Arabidopsis thaliana
agaatcttgataatgct

SEQ ID NO: 171745 - DNA, 17 bp, Arabidopsis thaliana
agaatcttgataattct

SEQ ID NO: 171746 - DNA, 17 bp, Arabidopsis thaliana
agaatcttgatgaagca

SEQ ID NO: 171747 - DNA, 17 bp, Arabidopsis thaliana
agaatcttgatgaagct

SEQ ID NO: 171748 - DNA, 17 bp, Arabidopsis thaliana
agaatcttgatgacgca

SEQ ID NO: 171749 - DNA, 17 bp, Arabidopsis thaliana
agaatcttgatgacgct

SEQ ID NO: 171750 - DNA, 17 bp, Arabidopsis thaliana
agaatcttgatgagcag

SEQ ID NO: 171751 - DNA, 17 bp, Arabidopsis thaliana
agaatcttgatgaggct

SEQ ID NO: 171752 - DNA, 17 bp, Arabidopsis thaliana
agaatcttgatgataat

SEQ ID NO: 171753 - DNA, 17 bp, Arabidopsis thaliana
agaatcttgatgatact

SEQ ID NO: 171754 - DNA, 17 bp, Arabidopsis thaliana
agaatcttgatgatcct

SEQ ID NO: 171755 - DNA, 17 bp, Arabidopsis thaliana
agaatcttgatgatgaa

SEQ ID NO: 171756 - DNA, 17 bp, Arabidopsis thaliana
agaatcttgatgatgat

SEQ ID NO: 171757 - DNA, 17 bp, Arabidopsis thaliana
agaatcttgatgatgca

SEQ ID NO: 171758 - DNA, 17 bp, Arabidopsis thaliana
agaatcttgatgatgcc

SEQ ID NO: 171759 - DNA, 17 bp, Arabidopsis thaliana
agaatcttgatgatgcg

SEQ ID NO: 171760 - DNA, 17 bp, Arabidopsis thaliana
agaatcttgatgatgct

SEQ ID NO: 171761 - DNA, 17 bp, Arabidopsis thaliana
agaatcttgatgatgga

SEQ ID NO: 171762 - DNA, 17 bp, Arabidopsis thaliana
agaatcttgatgatggt

SEQ ID NO: 171763 - DNA, 17 bp, Arabidopsis thaliana
agaatcttgatgatgta

SEQ ID NO: 171764 - DNA, 17 bp, Arabidopsis thaliana
agaatcttgatgatgtg

SEQ ID NO: 171765 - DNA, 17 bp, Arabidopsis thaliana
agaatcttgatgatgtt

SEQ ID NO: 171766 - DNA, 17 bp, Arabidopsis thaliana
agaatcttgatgattat

SEQ ID NO: 171767 - DNA, 17 bp, Arabidopsis thaliana
agaatcttgatgattca

SEQ ID NO: 171768 - DNA, 17 bp, Arabidopsis thaliana
agaatcttgatgattct

SEQ ID NO: 171769 - DNA, 17 bp, Arabidopsis thaliana
agaatcttgatgcatat

SEQ ID NO: 171770 - DNA, 17 bp, Arabidopsis thaliana
agaatcttgatgctgca

SEQ ID NO: 171771 - DNA, 17 bp, Arabidopsis thaliana
agaatcttgatgctgct

SEQ ID NO: 171772 - DNA, 17 bp, Arabidopsis thaliana
agaatcttgatggggat

SEQ ID NO: 171773 - DNA, 17 bp, Arabidopsis thaliana
agaatcttgatggtgct

SEQ ID NO: 171774 - DNA, 17 bp, Arabidopsis thaliana
agaatcttgatgttgct

SEQ ID NO: 171775 - DNA, 17 bp, Arabidopsis thaliana
agaatcttgattatgca

SEQ ID NO: 171776 - DNA, 17 bp, Arabidopsis thaliana
agaatcttgattatgct

SEQ ID NO: 171777 - DNA, 17 bp, Arabidopsis thaliana
agaatcttggtgatgct

SEQ ID NO: 171778 - DNA, 17 bp, Arabidopsis thaliana
agaatcttgtgatgctg

SEQ ID NO: 171779 - DNA, 17 bp, Arabidopsis thaliana
agaatgatgatgatgct

SEQ ID NO: 171780 - DNA, 17 bp, Arabidopsis thaliana
agaatgatgatgctgca

SEQ ID NO: 171781 - DNA, 17 bp, Arabidopsis thaliana
agaatgcaaaaaacgac

SEQ ID NO: 171782 - DNA, 17 bp, Arabidopsis thaliana
agaattataccgtgaga

SEQ ID NO: 171783 - DNA, 17 bp, Arabidopsis thaliana
agaattctttgcagaca

SEQ ID NO: 171784 - DNA, 17 bp, Arabidopsis thaliana
agaattgacatatactg

SEQ ID NO: 171785 - DNA, 17 bp, Arabidopsis thaliana
agaattgatgatgctgc

SEQ ID NO: 171786 - DNA, 17 bp, Arabidopsis thaliana
agaattttgatgatgct

SEQ ID NO: 171787 - DNA, 17 bp, Arabidopsis thaliana
agacaaatcgctccacc

SEQ ID NO: 171788 - DNA, 17 bp, Arabidopsis thaliana
agacaagggccaaggtt

SEQ ID NO: 171789 - DNA, 17 bp, Arabidopsis thaliana
agacaccgcggagacct

SEQ ID NO: 171790 - DNA, 17 bp, Arabidopsis thaliana
agacagacttttggggt

SEQ ID NO: 171791 - DNA, 17 bp, Arabidopsis thaliana
agacagattcggatgta

SEQ ID NO: 171792 - DNA, 17 bp, Arabidopsis thaliana
agacagattcggatgtt

SEQ ID NO: 171793 - DNA, 17 bp, Arabidopsis thaliana
agacagcaggacggtgg

SEQ ID NO: 171794 - DNA, 17 bp, Arabidopsis thaliana
agacaggttagttttac

SEQ ID NO: 171795 - DNA, 17 bp, Arabidopsis thaliana
agacagttgtcgactta

SEQ ID NO: 171796 - DNA, 17 bp, Arabidopsis thaliana
agacataattggaaaac

SEQ ID NO: 171797 - DNA, 17 bp, Arabidopsis thaliana
agacatggtatgaggcc

SEQ ID NO: 171798 - DNA, 17 bp, Arabidopsis thaliana
agacattatcgaatagc

SEQ ID NO: 171799 - DNA, 17 bp, Arabidopsis thaliana
agacattcccgaccccg

SEQ ID NO: 171800 - DNA, 17 bp, Arabidopsis thaliana
agacattggacatattc

SEQ ID NO: 171801 - DNA, 17 bp, Arabidopsis thaliana
agacattggacatattt

SEQ ID NO: 171802 - DNA, 17 bp, Arabidopsis thaliana
agacattgtttgagatc

SEQ ID NO: 171803 - DNA, 17 bp, Arabidopsis thaliana
agaccaaacggacccag

SEQ ID NO: 171804 - DNA, 17 bp, Arabidopsis thaliana
agaccaaatgttgttac

SEQ ID NO: 171805 - DNA, 17 bp, Arabidopsis thaliana
agaccagaccagaccag

SEQ ID NO: 171806 - DNA, 17 bp, Arabidopsis thaliana
agaccagcttccgtccc

SEQ ID NO: 171807 - DNA, 17 bp, Arabidopsis thaliana
agaccatgttgggggct

SEQ ID NO: 171808 - DNA, 17 bp, Arabidopsis thaliana
agaccatttgtgagaag

SEQ ID NO: 171809 - DNA, 17 bp, Arabidopsis thaliana
agacccagacgtaatca

SEQ ID NO: 171810 - DNA, 17 bp, Arabidopsis thaliana
agacccagttcgtcatc

SEQ ID NO: 171811 - DNA, 17 bp, Arabidopsis thaliana
agacccggagcaggcag

SEQ ID NO: 171812 - DNA, 17 bp, Arabidopsis thaliana
agacccgggttcgtttc

SEQ ID NO: 171813 - DNA, 17 bp, Arabidopsis thaliana
agaccctgaacaacctg

SEQ ID NO: 171814 - DNA, 17 bp, Arabidopsis thaliana
agaccctgttgagcttg

SEQ ID NO: 171815 - DNA, 17 bp, Arabidopsis thaliana
agaccgacacagcagaa

SEQ ID NO: 171816 - DNA, 17 bp, Arabidopsis thaliana
agaccgatgtcaacaaa

SEQ ID NO: 171817 - DNA, 17 bp, Arabidopsis thaliana
agaccgtcgcatccagg

SEQ ID NO: 171818 - DNA, 17 bp, Arabidopsis thaliana
agaccgtcgtgagacag

SEQ ID NO: 171819 - DNA, 17 bp, Arabidopsis thaliana
agaccgttacccgctgc

SEQ ID NO: 171820 - DNA, 17 bp, Arabidopsis thaliana
agacctatgtttctacc

SEQ ID NO: 171821 - DNA, 17 bp, Arabidopsis thaliana
agacctatttacttggg

SEQ ID NO: 171822 - DNA, 17 bp, Arabidopsis thaliana
agacctgaaggacagcc

SEQ ID NO: 171823 - DNA, 17 bp, Arabidopsis thaliana
agacctggaagccgagg

SEQ ID NO: 171824 - DNA, 17 bp, Arabidopsis thaliana
agaccttccaacagtta

SEQ ID NO: 171825 - DNA, 17 bp, Arabidopsis thaliana
agaccttcggaatttga

SEQ ID NO: 171826 - DNA, 17 bp, Arabidopsis thaliana
agaccttggcggagttc

SEQ ID NO: 171827 - DNA, 17 bp, Arabidopsis thaliana
agacgaacaactgcgaa

SEQ ID NO: 171828 - DNA, 17 bp, Arabidopsis thaliana
agacgaatcctccgtgc

SEQ ID NO: 171829 - DNA, 17 bp, Arabidopsis thaliana
agacgacggaagccgca

SEQ ID NO: 171830 - DNA, 17 bp, Arabidopsis thaliana
agacgacttgaaaatca

SEQ ID NO: 171831 - DNA, 17 bp, Arabidopsis thaliana
agacgacttgaaaatct

SEQ ID NO: 171832 - DNA, 17 bp, Arabidopsis thaliana
agacgaggaagtcgacg

SEQ ID NO: 171833 - DNA, 17 bp, Arabidopsis thaliana
agacgaggttgcttact

SEQ ID NO: 171834 - DNA, 17 bp, Arabidopsis thaliana
agacgattcgtcgattc

SEQ ID NO: 171835 - DNA, 17 bp, Arabidopsis thaliana
agacgctataactcaac

SEQ ID NO: 171836 - DNA, 17 bp, Arabidopsis thaliana
agacggcctgaacggac

SEQ ID NO: 171837 - DNA, 17 bp, Arabidopsis thaliana
agacggcgtaaaaactc

SEQ ID NO: 171838 - DNA, 17 bp, Arabidopsis thaliana
agacgtcgttgccgtga

SEQ ID NO: 171839 - DNA, 17 bp, Arabidopsis thaliana
agacgtgaatgatgcaa

SEQ ID NO: 171840 - DNA, 17 bp, Arabidopsis thaliana
agacgtgaatgatgcac

SEQ ID NO: 171841 - DNA, 17 bp, Arabidopsis thaliana
agactcggcattcaggc

SEQ ID NO: 171842 - DNA, 17 bp, Arabidopsis thaliana
agactctaggacaacaa

SEQ ID NO: 171843 - DNA, 17 bp, Arabidopsis thaliana
agactctgacgtttgtg

SEQ ID NO: 171844 - DNA, 17 bp, Arabidopsis thaliana
agactctgtggcccaat

SEQ ID NO: 171845 - DNA, 17 bp, Arabidopsis thaliana
agactcttgatgatgct

SEQ ID NO: 171846 - DNA, 17 bp, Arabidopsis thaliana
agactgagagctctttc

SEQ ID NO: 171847 - DNA, 17 bp, Arabidopsis thaliana
agactgagctccttgct

SEQ ID NO: 171848 - DNA, 17 bp, Arabidopsis thaliana
agactgatgctcttgct

SEQ ID NO: 171849 - DNA, 17 bp, Arabidopsis thaliana
agactggaacagcgggg

SEQ ID NO: 171850 - DNA, 17 bp, Arabidopsis thaliana
agactgtatcctaaatt

SEQ ID NO: 171851 - DNA, 17 bp, Arabidopsis thaliana
agactgtgaaactgcga

SEQ ID NO: 171852 - DNA, 17 bp, Arabidopsis thaliana
agacttagccaacgaca

SEQ ID NO: 171853 - DNA, 17 bp, Arabidopsis thaliana
agacttcggctagtcac

SEQ ID NO: 171854 - DNA, 17 bp, Arabidopsis thaliana
agacttctatgctactt

SEQ ID NO: 171855 - DNA, 17 bp, Arabidopsis thaliana
agactttggctagtcac

SEQ ID NO: 171856 - DNA, 17 bp, Arabidopsis thaliana
agagaaacatgagagaa

SEQ ID NO: 171857 - DNA, 17 bp, Arabidopsis thaliana
agagaaagaccctatca

SEQ ID NO: 171858 - DNA, 17 bp, Arabidopsis thaliana
agagaaagaccctatcc

SEQ ID NO: 171859 - DNA, 17 bp, Arabidopsis thaliana
agagaaatcgtagttta

SEQ ID NO: 171860 - DNA, 17 bp, Arabidopsis thaliana
agagaacttattgacct

SEQ ID NO: 171861 - DNA, 17 bp, Arabidopsis thaliana
agagaacttattggcct

SEQ ID NO: 171862 - DNA, 17 bp, Arabidopsis thaliana
agagaagatgcaaacta

SEQ ID NO: 171863 - DNA, 17 bp, Arabidopsis thaliana
agagaaggtttggaagc

SEQ ID NO: 171864 - DNA, 17 bp, Arabidopsis thaliana
agagaagtgagatgaaa

SEQ ID NO: 171865 - DNA, 17 bp, Arabidopsis thaliana
agagaagttcgactttt

SEQ ID NO: 171866 - DNA, 17 bp, Arabidopsis thaliana
agagaatgtcaaccaga

SEQ ID NO: 171867 - DNA, 17 bp, Arabidopsis thaliana
agagacagccaggaggt

SEQ ID NO: 171868 - DNA, 17 bp, Arabidopsis thaliana
agagactatcgatgatt

SEQ ID NO: 171869 - DNA, 17 bp, Arabidopsis thaliana
agagacttatttccagt

SEQ ID NO: 171870 - DNA, 17 bp, Arabidopsis thaliana
agagagccgcctccgcc

SEQ ID NO: 171871 - DNA, 17 bp, Arabidopsis thaliana
agagatcaagtttgtgg

SEQ ID NO: 171872 - DNA, 17 bp, Arabidopsis thaliana
agagatgcggatcgccg

SEQ ID NO: 171873 - DNA, 17 bp, Arabidopsis thaliana
agagatggggtcttaca

SEQ ID NO: 171874 - DNA, 17 bp, Arabidopsis thaliana
agagatttttctcgacg

SEQ ID NO: 171875 - DNA, 17 bp, Arabidopsis thaliana
agagcaacgggcagaga

SEQ ID NO: 171876 - DNA, 17 bp, Arabidopsis thaliana
agagcaccgcacgtcgc

SEQ ID NO: 171877 - DNA, 17 bp, Arabidopsis thaliana
agagccgacatcgaagg

SEQ ID NO: 171878 - DNA, 17 bp, Arabidopsis thaliana
agagcctcgcatgatct

SEQ ID NO: 171879 - DNA, 17 bp, Arabidopsis thaliana
agagcgacgggcagagc

SEQ ID NO: 171880 - DNA, 17 bp, Arabidopsis thaliana
agagcgagaggaaataa

SEQ ID NO: 171881 - DNA, 17 bp, Arabidopsis thaliana
agagctccaggacatgc

SEQ ID NO: 171882 - DNA, 17 bp, Arabidopsis thaliana
agagctgttgattacta

SEQ ID NO: 171883 - DNA, 17 bp, Arabidopsis thaliana
agagcttcagaagcagt

SEQ ID NO: 171884 - DNA, 17 bp, Arabidopsis thaliana
agagcttccttgagtca

SEQ ID NO: 171885 - DNA, 17 bp, Arabidopsis thaliana
agagcttccttgagtcc

SEQ ID NO: 171886 - DNA, 17 bp, Arabidopsis thaliana
agagcttctttgagtcc

SEQ ID NO: 171887 - DNA, 17 bp, Arabidopsis thaliana
agagctttcttcggtcc

SEQ ID NO: 171888 - DNA, 17 bp, Arabidopsis thaliana
agaggaaccgttgattc

SEQ ID NO: 171889 - DNA, 17 bp, Arabidopsis thaliana
agaggaagacggtggcg

SEQ ID NO: 171890 - DNA, 17 bp, Arabidopsis thaliana
agaggaagataggacga

SEQ ID NO: 171891 - DNA, 17 bp, Arabidopsis thaliana
agaggaagataggacgc

SEQ ID NO: 171892 - DNA, 17 bp, Arabidopsis thaliana
agaggacagaccaaaga

SEQ ID NO: 171893 - DNA, 17 bp, Arabidopsis thaliana
agaggagggacggtcct

SEQ ID NO: 171894 - DNA, 17 bp, Arabidopsis thaliana
agaggatgtcaaccaac

SEQ ID NO: 171895 - DNA, 17 bp, Arabidopsis thaliana
agaggatgtcaaccaga

SEQ ID NO: 171896 - DNA, 17 bp, Arabidopsis thaliana
agaggctgtcaaccaaa

SEQ ID NO: 171897 - DNA, 17 bp, Arabidopsis thaliana
agagggaaaaccaactg

SEQ ID NO: 171898 - DNA, 17 bp, Arabidopsis thaliana
agagggacaatatttgc

SEQ ID NO: 171899 - DNA, 17 bp, Arabidopsis thaliana
agagggacatcttcgac

SEQ ID NO: 171900 - DNA, 17 bp, Arabidopsis thaliana
agagggacgaatgcacg

SEQ ID NO: 171901 - DNA, 17 bp, Arabidopsis thaliana
agaggtctagattgcag

SEQ ID NO: 171902 - DNA, 17 bp, Arabidopsis thaliana
agaggttgctccactct

SEQ ID NO: 171903 - DNA, 17 bp, Arabidopsis thaliana
agagtaccggggaagta

SEQ ID NO: 171904 - DNA, 17 bp, Arabidopsis thaliana
agagtatacggacgtgt

SEQ ID NO: 171905 - DNA, 17 bp, Arabidopsis thaliana
agagtcgcctatgcgtt

SEQ ID NO: 171906 - DNA, 17 bp, Arabidopsis thaliana
agagtctggtcttcgca

SEQ ID NO: 171907 - DNA, 17 bp, Arabidopsis thaliana
agagtcttgatgatgca

SEQ ID NO: 171908 - DNA, 17 bp, Arabidopsis thaliana
agagtcttgatgatgct

SEQ ID NO: 171909 - DNA, 17 bp, Arabidopsis thaliana
agagtgaggagagttta

SEQ ID NO: 171910 - DNA, 17 bp, Arabidopsis thaliana
agagttaataggcagaa

SEQ ID NO: 171911 - DNA, 17 bp, Arabidopsis thaliana
agagttacaacttttta

SEQ ID NO: 171912 - DNA, 17 bp, Arabidopsis thaliana
agagttcgactcgtatt

SEQ ID NO: 171913 - DNA, 17 bp, Arabidopsis thaliana
agagttgcatctaccaa

SEQ ID NO: 171914 - DNA, 17 bp, Arabidopsis thaliana
agagttgcatctaccac

SEQ ID NO: 171915 - DNA, 17 bp, Arabidopsis thaliana
agataaaaaggtcgacg

SEQ ID NO: 171916 - DNA, 17 bp, Arabidopsis thaliana
agataacagcgaccaaa

SEQ ID NO: 171917 - DNA, 17 bp, Arabidopsis thaliana
agataacgcaggtgtcc

SEQ ID NO: 171918 - DNA, 17 bp, Arabidopsis thaliana
agataagcagtgtagcg

SEQ ID NO: 171919 - DNA, 17 bp, Arabidopsis thaliana
agataagcgccttagta

SEQ ID NO: 171920 - DNA, 17 bp, Arabidopsis thaliana
agataaggaaaacccca

SEQ ID NO: 171921 - DNA, 17 bp, Arabidopsis thaliana
agatacacactgatgca

SEQ ID NO: 171922 - DNA, 17 bp, Arabidopsis thaliana
agatacacactgatgct

SEQ ID NO: 171923 - DNA, 17 bp, Arabidopsis thaliana
agatacccctcgggagg

SEQ ID NO: 171924 - DNA, 17 bp, Arabidopsis thaliana
agatactacacttgatc

SEQ ID NO: 171925 - DNA, 17 bp, Arabidopsis thaliana
agatagccagatcgata

SEQ ID NO: 171926 - DNA, 17 bp, Arabidopsis thaliana
agataggacgcataaca

SEQ ID NO: 171927 - DNA, 17 bp, Arabidopsis thaliana
agatagtctaagtcatg

SEQ ID NO: 171928 - DNA, 17 bp, Arabidopsis thaliana
agatattagtgcggtta

SEQ ID NO: 171929 - DNA, 17 bp, Arabidopsis thaliana
agatattagtgcggttc

SEQ ID NO: 171930 - DNA, 17 bp, Arabidopsis thaliana
agatattattgcggttc

SEQ ID NO: 171931 - DNA, 17 bp, Arabidopsis thaliana
agatattcacgaagaaa

SEQ ID NO: 171932 - DNA, 17 bp, Arabidopsis thaliana
agatattggtccggttc

SEQ ID NO: 171933 - DNA, 17 bp, Arabidopsis thaliana
agatattggtgcggttc

SEQ ID NO: 171934 - DNA, 17 bp, Arabidopsis thaliana
agatattggtgcgttca

SEQ ID NO: 171935 - DNA, 17 bp, Arabidopsis thaliana
agatcaagtttgtggga

SEQ ID NO: 171936 - DNA, 17 bp, Arabidopsis thaliana
agatcaggctgagtttc

SEQ ID NO: 171937 - DNA, 17 bp, Arabidopsis thaliana
agatcagtgtttgcacg

SEQ ID NO: 171938 - DNA, 17 bp, Arabidopsis thaliana
agatcatgaattagtaa

SEQ ID NO: 171939 - DNA, 17 bp, Arabidopsis thaliana
agatcattaatgtttgc

SEQ ID NO: 171940 - DNA, 17 bp, Arabidopsis thaliana
agatccctcccaaaacc

SEQ ID NO: 171941 - DNA, 17 bp, Arabidopsis thaliana
agatccgacccgtgggc

SEQ ID NO: 171942 - DNA, 17 bp, Arabidopsis thaliana
agatccggctaagatca

SEQ ID NO: 171943 - DNA, 17 bp, Arabidopsis thaliana
agatccgttcttgaacc

SEQ ID NO: 171944 - DNA, 17 bp, Arabidopsis thaliana
agatcctaacaagcgtc

SEQ ID NO: 171945 - DNA, 17 bp, Arabidopsis thaliana
agatcgtacgcaaaagt

SEQ ID NO: 171946 - DNA, 17 bp, Arabidopsis thaliana
agatcgtgatggtctat

SEQ ID NO: 171947 - DNA, 17 bp, Arabidopsis thaliana
agatctaattcacaaga

SEQ ID NO: 171948 - DNA, 17 bp, Arabidopsis thaliana
agatctaattcacaata

SEQ ID NO: 171949 - DNA, 17 bp, Arabidopsis thaliana
agatctatttctaagct

SEQ ID NO: 171950 - DNA, 17 bp, Arabidopsis thaliana
agatctcataccgaacg

SEQ ID NO: 171951 - DNA, 17 bp, Arabidopsis thaliana
agatctgacaatcattt

SEQ ID NO: 171952 - DNA, 17 bp, Arabidopsis thaliana
agatctgccatttttag

SEQ ID NO: 171953 - DNA, 17 bp, Arabidopsis thaliana
agatctggaaggaaaga

SEQ ID NO: 171954 - DNA, 17 bp, Arabidopsis thaliana
agatctggctgacatcc

SEQ ID NO: 171955 - DNA, 17 bp, Arabidopsis thaliana
agatctggttacttatg

SEQ ID NO: 171956 - DNA, 17 bp, Arabidopsis thaliana
agatctggttgacaacc

SEQ ID NO: 171957 - DNA, 17 bp, Arabidopsis thaliana
agatctggttgacatcc

SEQ ID NO: 171958 - DNA, 17 bp, Arabidopsis thaliana
agatctgttagggtttc

SEQ ID NO: 171959 - DNA, 17 bp, Arabidopsis thaliana
agatcttagaaaatgaa

SEQ ID NO: 171960 - DNA, 17 bp, Arabidopsis thaliana
agatcttcaagaacaga

SEQ ID NO: 171961 - DNA, 17 bp, Arabidopsis thaliana
agatcttgatgatgctg

SEQ ID NO: 171962 - DNA, 17 bp, Arabidopsis thaliana
agatcttgcagctgtga

SEQ ID NO: 171963 - DNA, 17 bp, Arabidopsis thaliana
agatgaagaatccggcg

SEQ ID NO: 171964 - DNA, 17 bp, Arabidopsis thaliana
agatgaatgtggtagat

SEQ ID NO: 171965 - DNA, 17 bp, Arabidopsis thaliana
agatgacagcgacggga

SEQ ID NO: 171966 - DNA, 17 bp, Arabidopsis thaliana
agatgaggtatttttat

SEQ ID NO: 171967 - DNA, 17 bp, Arabidopsis thaliana
agatgctcatttgagca

SEQ ID NO: 171968 - DNA, 17 bp, Arabidopsis thaliana
agatgctccatgtttct

SEQ ID NO: 171969 - DNA, 17 bp, Arabidopsis thaliana
agatgctgcaagggttt

SEQ ID NO: 171970 - DNA, 17 bp, Arabidopsis thaliana
agatggagaaagggaaa

SEQ ID NO: 171971 - DNA, 17 bp, Arabidopsis thaliana
agatggagtgatgcttc

SEQ ID NO: 171972 - DNA, 17 bp, Arabidopsis thaliana
agatggatcacctgccc

SEQ ID NO: 171973 - DNA, 17 bp, Arabidopsis thaliana
agatggatcacggatca

SEQ ID NO: 171974 - DNA, 17 bp, Arabidopsis thaliana
agatggatcatcctgta

SEQ ID NO: 171975 - DNA, 17 bp, Arabidopsis thaliana
agatggatcatctgccg

SEQ ID NO: 171976 - DNA, 17 bp, Arabidopsis thaliana
agatggatccatcctgt

SEQ ID NO: 171977 - DNA, 17 bp, Arabidopsis thaliana
agatggatctgaagctg

SEQ ID NO: 171978 - DNA, 17 bp, Arabidopsis thaliana
agatggatctgtgttct

SEQ ID NO: 171979 - DNA, 17 bp, Arabidopsis thaliana
agatggatcttcgttcg

SEQ ID NO: 171980 - DNA, 17 bp, Arabidopsis thaliana
agatggatcttctaagt

SEQ ID NO: 171981 - DNA, 17 bp, Arabidopsis thaliana
agatggattttcgttgt

SEQ ID NO: 171982 - DNA, 17 bp, Arabidopsis thaliana
agatggccgagcggtct

SEQ ID NO: 171983 - DNA, 17 bp, Arabidopsis thaliana
agatgggaggcccataa

SEQ ID NO: 171984 - DNA, 17 bp, Arabidopsis thaliana
agatggtgaactatgcc

SEQ ID NO: 171985 - DNA, 17 bp, Arabidopsis thaliana
agatgtggctgagtgtt

SEQ ID NO: 171986 - DNA, 17 bp, Arabidopsis thaliana
agatgttctggccgcac

SEQ ID NO: 171987 - DNA, 17 bp, Arabidopsis thaliana
agatgttctgggccgca

SEQ ID NO: 171988 - DNA, 17 bp, Arabidopsis thaliana
agattaagccatgcatg

SEQ ID NO: 171989 - DNA, 17 bp, Arabidopsis thaliana
agattagttggaacgat

SEQ ID NO: 171990 - DNA, 17 bp, Arabidopsis thaliana
agattcaattgcacatc

SEQ ID NO: 171991 - DNA, 17 bp, Arabidopsis thaliana
agattcaatttgcagga

SEQ ID NO: 171992 - DNA, 17 bp, Arabidopsis thaliana
agattcacgcacaaact

SEQ ID NO: 171993 - DNA, 17 bp, Arabidopsis thaliana
agattcagccctttgtc

SEQ ID NO: 171994 - DNA, 17 bp, Arabidopsis thaliana
agattcccactgtccct

SEQ ID NO: 171995 - DNA, 17 bp, Arabidopsis thaliana
agattgagccgcgccaa

SEQ ID NO: 171996 - DNA, 17 bp, Arabidopsis thaliana
agattgagcggagatct

SEQ ID NO: 171997 - DNA, 17 bp, Arabidopsis thaliana
agattgggtttgggacg

SEQ ID NO: 171998 - DNA, 17 bp, Arabidopsis thaliana
agatttctcacctgtgc

SEQ ID NO: 171999 - DNA, 17 bp, Arabidopsis thaliana
agatttgatcgacgaga

SEQ ID NO: 172000 - DNA, 17 bp, Arabidopsis thaliana
agatttgggatgtgcta

SEQ ID NO: 172001 - DNA, 17 bp, Arabidopsis thaliana
agatttgggccaacacg

SEQ ID NO: 172002 - DNA, 17 bp, Arabidopsis thaliana
agattttattcgttgcg

SEQ ID NO: 172003 - DNA, 17 bp, Arabidopsis thaliana
agattttcgccatctat

SEQ ID NO: 172004 - DNA, 17 bp, Arabidopsis thaliana
agatttttcttgacctt

SEQ ID NO: 172005 - DNA, 17 bp, Arabidopsis thaliana
agatttttgagacaaat

SEQ ID NO: 172006 - DNA, 17 bp, Arabidopsis thaliana
agattttttgagacaaa

SEQ ID NO: 172007 - DNA, 17 bp, Arabidopsis thaliana
agcaaaacgaccggaga

SEQ ID NO: 172008 - DNA, 17 bp, Arabidopsis thaliana
agcaaaggatggtgagg

SEQ ID NO: 172009 - DNA, 17 bp, Arabidopsis thaliana
agcaaagggatccttcc

SEQ ID NO: 172010 - DNA, 17 bp, Arabidopsis thaliana
agcaaatacagctgagc

SEQ ID NO: 172011 - DNA, 17 bp, Arabidopsis thaliana
agcaaccgcaggagaca

SEQ ID NO: 172012 - DNA, 17 bp, Arabidopsis thaliana
agcaactgttctttaga

SEQ ID NO: 172013 - DNA, 17 bp, Arabidopsis thaliana
agcaagacattgtttga

SEQ ID NO: 172014 - DNA, 17 bp, Arabidopsis thaliana
agcaagcgaatgagtca

SEQ ID NO: 172015 - DNA, 17 bp, Arabidopsis thaliana
agcaaggactgtttccc

SEQ ID NO: 172016 - DNA, 17 bp, Arabidopsis thaliana
agcaaggatggctgttg

SEQ ID NO: 172017 - DNA, 17 bp, Arabidopsis thaliana
agcaaggccactctgcc

SEQ ID NO: 172018 - DNA, 17 bp, Arabidopsis thaliana
agcaaggccactctgtc

SEQ ID NO: 172019 - DNA, 17 bp, Arabidopsis thaliana
agcaatagacgcgccta

SEQ ID NO: 172020 - DNA, 17 bp, Arabidopsis thaliana
agcacactgatgctgac

SEQ ID NO: 172021 - DNA, 17 bp, Arabidopsis thaliana
agcacaggtgcccctcc

SEQ ID NO: 172022 - DNA, 17 bp, Arabidopsis thaliana
agcacagtcatagatag

SEQ ID NO: 172023 - DNA, 17 bp, Arabidopsis thaliana
agcacatcccaaatcca

SEQ ID NO: 172024 - DNA, 17 bp, Arabidopsis thaliana
agcacatcccaaatctc

SEQ ID NO: 172025 - DNA, 17 bp, Arabidopsis thaliana
agcaccccagaagccga

SEQ ID NO: 172026 - DNA, 17 bp, Arabidopsis thaliana
agcacctggttgccgac

SEQ ID NO: 172027 - DNA, 17 bp, Arabidopsis thaliana
agcacgagcaatggtag

SEQ ID NO: 172028 - DNA, 17 bp, Arabidopsis thaliana
agcacgcggcgacccgc

SEQ ID NO: 172029 - DNA, 17 bp, Arabidopsis thaliana
agcactaatgcaccgga

SEQ ID NO: 172030 - DNA, 17 bp, Arabidopsis thaliana
agcagaactggcgatgc

SEQ ID NO: 172031 - DNA, 17 bp, Arabidopsis thaliana
agcagactcgtaagctt

SEQ ID NO: 172032 - DNA, 17 bp, Arabidopsis thaliana
agcagagtggcgcagcg

SEQ ID NO: 172033 - DNA, 17 bp, Arabidopsis thaliana
agcagatcatcaagggg

SEQ ID NO: 172034 - DNA, 17 bp, Arabidopsis thaliana
agcagatgagtacatac

SEQ ID NO: 172035 - DNA, 17 bp, Arabidopsis thaliana
agcagcaattatgaccc

SEQ ID NO: 172036 - DNA, 17 bp, Arabidopsis thaliana
agcagccgcggtaattc

SEQ ID NO: 172037 - DNA, 17 bp, Arabidopsis thaliana
agcagcgactcaagcac

SEQ ID NO: 172038 - DNA, 17 bp, Arabidopsis thaliana
agcagcgattacttccc

SEQ ID NO: 172039 - DNA, 17 bp, Arabidopsis thaliana
agcaggacggtggtcat

SEQ ID NO: 172040 - DNA, 17 bp, Arabidopsis thaliana
agcaggccatggtgaat

SEQ ID NO: 172041 - DNA, 17 bp, Arabidopsis thaliana
agcaggctgaggtctcg

SEQ ID NO: 172042 - DNA, 17 bp, Arabidopsis thaliana
agcagggccactctgcc

SEQ ID NO: 172043 - DNA, 17 bp, Arabidopsis thaliana
agcaggtctccaaggtg

SEQ ID NO: 172044 - DNA, 17 bp, Arabidopsis thaliana
agcaggtctgtgatgcc

SEQ ID NO: 172045 - DNA, 17 bp, Arabidopsis thaliana
agcagtctctttggcta

SEQ ID NO: 172046 - DNA, 17 bp, Arabidopsis thaliana
agcagtgaagtactctg

SEQ ID NO: 172047 - DNA, 17 bp, Arabidopsis thaliana
agcagtggatagcaggc

SEQ ID NO: 172048 - DNA, 17 bp, Arabidopsis thaliana
agcagtgtagcggtcat

SEQ ID NO: 172049 - DNA, 17 bp, Arabidopsis thaliana
agcatacagcaccggga

SEQ ID NO: 172050 - DNA, 17 bp, Arabidopsis thaliana
agcatatatccaacgtt

SEQ ID NO: 172051 - DNA, 17 bp, Arabidopsis thaliana
agcatcatcaagattct

SEQ ID NO: 172052 - DNA, 17 bp, Arabidopsis thaliana
agcatccgcagggacca

SEQ ID NO: 172053 - DNA, 17 bp, Arabidopsis thaliana
agcatcctgtagatgga

SEQ ID NO: 172054 - DNA, 17 bp, Arabidopsis thaliana
agcatcttgatgatgca

SEQ ID NO: 172055 - DNA, 17 bp, Arabidopsis thaliana
agcatcttgccggattg

SEQ ID NO: 172056 - DNA, 17 bp, Arabidopsis thaliana
agcatgcctgtcgggac

SEQ ID NO: 172057 - DNA, 17 bp, Arabidopsis thaliana
agcatggcccctgcgca

SEQ ID NO: 172058 - DNA, 17 bp, Arabidopsis thaliana
agcattaacgcttggac

SEQ ID NO: 172059 - DNA, 17 bp, Arabidopsis thaliana
agcattattcagaaacg

SEQ ID NO: 172060 - DNA, 17 bp, Arabidopsis thaliana
agcattgcgatggtccc

SEQ ID NO: 172061 - DNA, 17 bp, Arabidopsis thaliana
agcatttgccaaggatg

SEQ ID NO: 172062 - DNA, 17 bp, Arabidopsis thaliana
agccaaaaccagaagga

SEQ ID NO: 172063 - DNA, 17 bp, Arabidopsis thaliana
agccaaatgcctcgtca

SEQ ID NO: 172064 - DNA, 17 bp, Arabidopsis thaliana
agccaacgacacgtgca

SEQ ID NO: 172065 - DNA, 17 bp, Arabidopsis thaliana
agccaacgacacgtgcc

SEQ ID NO: 172066 - DNA, 17 bp, Arabidopsis thaliana
agccaagaagtcgactg

SEQ ID NO: 172067 - DNA, 17 bp, Arabidopsis thaliana
agccaagcgttcatagc

SEQ ID NO: 172068 - DNA, 17 bp, Arabidopsis thaliana
agccaaggacgacttgc

SEQ ID NO: 172069 - DNA, 17 bp, Arabidopsis thaliana
agccaaggatgacttga

SEQ ID NO: 172070 - DNA, 17 bp, Arabidopsis thaliana
agccaaggatgacttgc

SEQ ID NO: 172071 - DNA, 17 bp, Arabidopsis thaliana
agccacgttctattctg

SEQ ID NO: 172072 - DNA, 17 bp, Arabidopsis thaliana
agccaggctctgatacc

SEQ ID NO: 172073 - DNA, 17 bp, Arabidopsis thaliana
agccagtggcgcgaagc

SEQ ID NO: 172074 - DNA, 17 bp, Arabidopsis thaliana
agccatatagcctattg

SEQ ID NO: 172075 - DNA, 17 bp, Arabidopsis thaliana
agccatgcatgtgtaag

SEQ ID NO: 172076 - DNA, 17 bp, Arabidopsis thaliana
agccattccttaagggc

SEQ ID NO: 172077 - DNA, 17 bp, Arabidopsis thaliana
agccatttgggttctgc

SEQ ID NO: 172078 - DNA, 17 bp, Arabidopsis thaliana
agcccaaaatattcgcc

SEQ ID NO: 172079 - DNA, 17 bp, Arabidopsis thaliana
agcccagtggctgtcct

SEQ ID NO: 172080 - DNA, 17 bp, Arabidopsis thaliana
agccccgaaaatggatg

SEQ ID NO: 172081 - DNA, 17 bp, Arabidopsis thaliana
agccccgtcgtgcccgg

SEQ ID NO: 172082 - DNA, 17 bp, Arabidopsis thaliana
agcccgcagcgatactg

SEQ ID NO: 172083 - DNA, 17 bp, Arabidopsis thaliana
agcccgtcccccggccg

SEQ ID NO: 172084 - DNA, 17 bp, Arabidopsis thaliana
agccctcagagccaatc

SEQ ID NO: 172085 - DNA, 17 bp, Arabidopsis thaliana
agccctgggctctgacc

SEQ ID NO: 172086 - DNA, 17 bp, Arabidopsis thaliana
agccctttgccctaaga

SEQ ID NO: 172087 - DNA, 17 bp, Arabidopsis thaliana
agccctttgtcgctaag

SEQ ID NO: 172088 - DNA, 17 bp, Arabidopsis thaliana
agccctttgtcgctcgc

SEQ ID NO: 172089 - DNA, 17 bp, Arabidopsis thaliana
agccgacgggttcggaa

SEQ ID NO: 172090 - DNA, 17 bp, Arabidopsis thaliana
agccgactgcgcaaggc

SEQ ID NO: 172091 - DNA, 17 bp, Arabidopsis thaliana
agccgcatcctgtagat

SEQ ID NO: 172092 - DNA, 17 bp, Arabidopsis thaliana
agccgcggtaattccag

SEQ ID NO: 172093 - DNA, 17 bp, Arabidopsis thaliana
agccggaggtagggtcc

SEQ ID NO: 172094 - DNA, 17 bp, Arabidopsis thaliana
agccggccgtgaaggga

SEQ ID NO: 172095 - DNA, 17 bp, Arabidopsis thaliana
agccgtgaagggatgcc

SEQ ID NO: 172096 - DNA, 17 bp, Arabidopsis thaliana
agccgtttccagggtgg

SEQ ID NO: 172097 - DNA, 17 bp, Arabidopsis thaliana
agcctaagctcctactg

SEQ ID NO: 172098 - DNA, 17 bp, Arabidopsis thaliana
agcctacctggacgaca

SEQ ID NO: 172099 - DNA, 17 bp, Arabidopsis thaliana
agcctatcccgacctgg

SEQ ID NO: 172100 - DNA, 17 bp, Arabidopsis thaliana
agcctattgttggacta

SEQ ID NO: 172101 - DNA, 17 bp, Arabidopsis thaliana
agcctcagccttttcac

SEQ ID NO: 172102 - DNA, 17 bp, Arabidopsis thaliana
agcctctggtcgatgga

SEQ ID NO: 172103 - DNA, 17 bp, Arabidopsis thaliana
agcctgctaacgatcca

SEQ ID NO: 172104 - DNA, 17 bp, Arabidopsis thaliana
agcctggctccctgtat

SEQ ID NO: 172105 - DNA, 17 bp, Arabidopsis thaliana
agcctgtgatgtttgag

SEQ ID NO: 172106 - DNA, 17 bp, Arabidopsis thaliana
agcctgtggcgcgaagc

SEQ ID NO: 172107 - DNA, 17 bp, Arabidopsis thaliana
agccttgatgattcgac

SEQ ID NO: 172108 - DNA, 17 bp, Arabidopsis thaliana
agcgaagacgaaggtgg

SEQ ID NO: 172109 - DNA, 17 bp, Arabidopsis thaliana
agcgaagataacacata

SEQ ID NO: 172110 - DNA, 17 bp, Arabidopsis thaliana
agcgaagcccgacgcac

SEQ ID NO: 172111 - DNA, 17 bp, Arabidopsis thaliana
agcgaatcgagcctgac

SEQ ID NO: 172112 - DNA, 17 bp, Arabidopsis thaliana
agcgaatggacttgatc

SEQ ID NO: 172113 - DNA, 17 bp, Arabidopsis thaliana
agcgacgggattgaaga

SEQ ID NO: 172114 - DNA, 17 bp, Arabidopsis thaliana
agcgacgggattgaagg

SEQ ID NO: 172115 - DNA, 17 bp, Arabidopsis thaliana
agcgacgggcggtgtga

SEQ ID NO: 172116 - DNA, 17 bp, Arabidopsis thaliana
agcgacgggcggtgtgt

SEQ ID NO: 172117 - DNA, 17 bp, Arabidopsis thaliana
agcgacggtgtcctttc

SEQ ID NO: 172118 - DNA, 17 bp, Arabidopsis thaliana
agcgacgtcatgcttgc

SEQ ID NO: 172119 - DNA, 17 bp, Arabidopsis thaliana
agcgacgtgattgaaga

SEQ ID NO: 172120 - DNA, 17 bp, Arabidopsis thaliana
agcgacgttgcttttta

SEQ ID NO: 172121 - DNA, 17 bp, Arabidopsis thaliana
agcgacgttgctttttg

SEQ ID NO: 172122 - DNA, 17 bp, Arabidopsis thaliana
agcgactcgcgttggcc

SEQ ID NO: 172123 - DNA, 17 bp, Arabidopsis thaliana
agcgactctcggcaacg

SEQ ID NO: 172124 - DNA, 17 bp, Arabidopsis thaliana
agcgagaggaaatagga

SEQ ID NO: 172125 - DNA, 17 bp, Arabidopsis thaliana
agcgagatcgctaggct

SEQ ID NO: 172126 - DNA, 17 bp, Arabidopsis thaliana
agcgagtaaaggaaaaa

SEQ ID NO: 172127 - DNA, 17 bp, Arabidopsis thaliana
agcgatcttttcgtagg

SEQ ID NO: 172128 - DNA, 17 bp, Arabidopsis thaliana
agcgatgacaaccagga

SEQ ID NO: 172129 - DNA, 17 bp, Arabidopsis thaliana
agcgatttgtctggtta

SEQ ID NO: 172130 - DNA, 17 bp, Arabidopsis thaliana
agcgcccggtggtgatt

SEQ ID NO: 172131 - DNA, 17 bp, Arabidopsis thaliana
agcgccggaggcacgac

SEQ ID NO: 172132 - DNA, 17 bp, Arabidopsis thaliana
agcgcgaacttcgaaag

SEQ ID NO: 172133 - DNA, 17 bp, Arabidopsis thaliana
agcgcgggtaaacggcg

SEQ ID NO: 172134 - DNA, 17 bp, Arabidopsis thaliana
agcgcttgtgaccagac

SEQ ID NO: 172135 - DNA, 17 bp, Arabidopsis thaliana
agcggactgctcgagct

SEQ ID NO: 172136 - DNA, 17 bp, Arabidopsis thaliana
agcggaggaaaagaaac

SEQ ID NO: 172137 - DNA, 17 bp, Arabidopsis thaliana
agcggaggcggtggaga

SEQ ID NO: 172138 - DNA, 17 bp, Arabidopsis thaliana
agcggaggcggtggagt

SEQ ID NO: 172139 - DNA, 17 bp, Arabidopsis thaliana
agcggatgaattttaca

SEQ ID NO: 172140 - DNA, 17 bp, Arabidopsis thaliana
agcggatgggggccggc

SEQ ID NO: 172141 - DNA, 17 bp, Arabidopsis thaliana
agcggatgtagccaagt

SEQ ID NO: 172142 - DNA, 17 bp, Arabidopsis thaliana
agcggatgttgcttata

SEQ ID NO: 172143 - DNA, 17 bp, Arabidopsis thaliana
agcggcactcggtcctc

SEQ ID NO: 172144 - DNA, 17 bp, Arabidopsis thaliana
agcggccgtcggtccct

SEQ ID NO: 172145 - DNA, 17 bp, Arabidopsis thaliana
agcggctggaagagcaa

SEQ ID NO: 172146 - DNA, 17 bp, Arabidopsis thaliana
agcggcttaagccatta

SEQ ID NO: 172147 - DNA, 17 bp, Arabidopsis thaliana
agcgggaagcatttgca

SEQ ID NO: 172148 - DNA, 17 bp, Arabidopsis thaliana
agcgggaggtgatcgct

SEQ ID NO: 172149 - DNA, 17 bp, Arabidopsis thaliana
agcgggaggtgatctct

SEQ ID NO: 172150 - DNA, 17 bp, Arabidopsis thaliana
agcgggcatttgtttgg

SEQ ID NO: 172151 - DNA, 17 bp, Arabidopsis thaliana
agcggggaaagaagacc

SEQ ID NO: 172152 - DNA, 17 bp, Arabidopsis thaliana
agcggttctgacgtgca

SEQ ID NO: 172153 - DNA, 17 bp, Arabidopsis thaliana
agcggttgagttcccga

SEQ ID NO: 172154 - DNA, 17 bp, Arabidopsis thaliana
agcggttgtgacttgtg

SEQ ID NO: 172155 - DNA, 17 bp, Arabidopsis thaliana
agcgtacatttgcctgc

SEQ ID NO: 172156 - DNA, 17 bp, Arabidopsis thaliana
agcgtatcgccgaccga

SEQ ID NO: 172157 - DNA, 17 bp, Arabidopsis thaliana
agcgtatgatgtcgatg

SEQ ID NO: 172158 - DNA, 17 bp, Arabidopsis thaliana
agcgtcctcagcgacgg

SEQ ID NO: 172159 - DNA, 17 bp, Arabidopsis thaliana
agcgtcctgttaccggc

SEQ ID NO: 172160 - DNA, 17 bp, Arabidopsis thaliana
agcgtcggtctccagga

SEQ ID NO: 172161 - DNA, 17 bp, Arabidopsis thaliana
agcgtcgtctatagtta

SEQ ID NO: 172162 - DNA, 17 bp, Arabidopsis thaliana
agcgtcgttcggaccga

SEQ ID NO: 172163 - DNA, 17 bp, Arabidopsis thaliana
agcgtcgttcggaccgc

SEQ ID NO: 172164 - DNA, 17 bp, Arabidopsis thaliana
agcgtcgttcggaccgt

SEQ ID NO: 172165 - DNA, 17 bp, Arabidopsis thaliana
agcgtctcactaataaa

SEQ ID NO: 172166 - DNA, 17 bp, Arabidopsis thaliana
agcgtctctgaatacat

SEQ ID NO: 172167 - DNA, 17 bp, Arabidopsis thaliana
agcgtggcctatcgatc

SEQ ID NO: 172168 - DNA, 17 bp, Arabidopsis thaliana
agcgttaggggctttgt

SEQ ID NO: 172169 - DNA, 17 bp, Arabidopsis thaliana
agcgttcaggagtgggc

SEQ ID NO: 172170 - DNA, 17 bp, Arabidopsis thaliana
agcgttgaggacaggcg

SEQ ID NO: 172171 - DNA, 17 bp, Arabidopsis thaliana
agcgtttgcatatagct

SEQ ID NO: 172172 - DNA, 17 bp, Arabidopsis thaliana
agctaaaatgctctgca

SEQ ID NO: 172173 - DNA, 17 bp, Arabidopsis thaliana
agctaaacccgatgcgg

SEQ ID NO: 172174 - DNA, 17 bp, Arabidopsis thaliana
agctaaggatttgcatt

SEQ ID NO: 172175 - DNA, 17 bp, Arabidopsis thaliana
agctaatccaaaatcac

SEQ ID NO: 172176 - DNA, 17 bp, Arabidopsis thaliana
agctaccgtgcgctgga

SEQ ID NO: 172177 - DNA, 17 bp, Arabidopsis thaliana
agctacgtggaggcatc

SEQ ID NO: 172178 - DNA, 17 bp, Arabidopsis thaliana
agctagatagattttta

SEQ ID NO: 172179 - DNA, 17 bp, Arabidopsis thaliana
agctagttagcaggcta

SEQ ID NO: 172180 - DNA, 17 bp, Arabidopsis thaliana
agctatacaacaggtgg

SEQ ID NO: 172181 - DNA, 17 bp, Arabidopsis thaliana
agctatcaaattgcgtc

SEQ ID NO: 172182 - DNA, 17 bp, Arabidopsis thaliana
agctatcgtagacatct

SEQ ID NO: 172183 - DNA, 17 bp, Arabidopsis thaliana
agctcaaaattacgctt

SEQ ID NO: 172184 - DNA, 17 bp, Arabidopsis thaliana
agctcaggaactggcca

SEQ ID NO: 172185 - DNA, 17 bp, Arabidopsis thaliana
agctcaggagggataga

SEQ ID NO: 172186 - DNA, 17 bp, Arabidopsis thaliana
agctcaggagggatagc

SEQ ID NO: 172187 - DNA, 17 bp, Arabidopsis thaliana
agctcaggagggatagt

SEQ ID NO: 172188 - DNA, 17 bp, Arabidopsis thaliana
agctcaggaggggtagc

SEQ ID NO: 172189 - DNA, 17 bp, Arabidopsis thaliana
agctcaggcgactcagc

SEQ ID NO: 172190 - DNA, 17 bp, Arabidopsis thaliana
agctccaggtgttgttc

SEQ ID NO: 172191 - DNA, 17 bp, Arabidopsis thaliana
agctccctcataagttg

SEQ ID NO: 172192 - DNA, 17 bp, Arabidopsis thaliana
agctcctactgagggtc

SEQ ID NO: 172193 - DNA, 17 bp, Arabidopsis thaliana
agctccttctccggccc

SEQ ID NO: 172194 - DNA, 17 bp, Arabidopsis thaliana
agctcgaacccttggag

SEQ ID NO: 172195 - DNA, 17 bp, Arabidopsis thaliana
agctcgactctagtccg

SEQ ID NO: 172196 - DNA, 17 bp, Arabidopsis thaliana
agctcgcgttgactaca

SEQ ID NO: 172197 - DNA, 17 bp, Arabidopsis thaliana
agctcgcgttgactacg

SEQ ID NO: 172198 - DNA, 17 bp, Arabidopsis thaliana
agctcgcgttgactatg

SEQ ID NO: 172199 - DNA, 17 bp, Arabidopsis thaliana
agctcgtagttgaacca

SEQ ID NO: 172200 - DNA, 17 bp, Arabidopsis thaliana
agctcgtagttgaacct

SEQ ID NO: 172201 - DNA, 17 bp, Arabidopsis thaliana
agctctaacaggccttg

SEQ ID NO: 172202 - DNA, 17 bp, Arabidopsis thaliana
agctctaagaactagtg

SEQ ID NO: 172203 - DNA, 17 bp, Arabidopsis thaliana
agctctcaacgaaagca

SEQ ID NO: 172204 - DNA, 17 bp, Arabidopsis thaliana
agctctgataccaaata

SEQ ID NO: 172205 - DNA, 17 bp, Arabidopsis thaliana
agctctgataccaaatg

SEQ ID NO: 172206 - DNA, 17 bp, Arabidopsis thaliana
agctctttcttgattct

SEQ ID NO: 172207 - DNA, 17 bp, Arabidopsis thaliana
agctgacttgcttcatg

SEQ ID NO: 172208 - DNA, 17 bp, Arabidopsis thaliana
agctgcagggtgtacgc

SEQ ID NO: 172209 - DNA, 17 bp, Arabidopsis thaliana
agctgcgcgaacgcaaa

SEQ ID NO: 172210 - DNA, 17 bp, Arabidopsis thaliana
agctgcggttttgtgtg

SEQ ID NO: 172211 - DNA, 17 bp, Arabidopsis thaliana
agctgctaagctatgga

SEQ ID NO: 172212 - DNA, 17 bp, Arabidopsis thaliana
agctgctaagctatgta

SEQ ID NO: 172213 - DNA, 17 bp, Arabidopsis thaliana
agctgctcgagcctgtg

SEQ ID NO: 172214 - DNA, 17 bp, Arabidopsis thaliana
agctgctgcgcattggg

SEQ ID NO: 172215 - DNA, 17 bp, Arabidopsis thaliana
agctggaattaccgcgg

SEQ ID NO: 172216 - DNA, 17 bp, Arabidopsis thaliana
agctggacttcgtagct

SEQ ID NO: 172217 - DNA, 17 bp, Arabidopsis thaliana
agctggagattgtgata

SEQ ID NO: 172218 - DNA, 17 bp, Arabidopsis thaliana
agctggagctcggacgc

SEQ ID NO: 172219 - DNA, 17 bp, Arabidopsis thaliana
agctggcaatgggacga

SEQ ID NO: 172220 - DNA, 17 bp, Arabidopsis thaliana
agctgggtttagaccgt

SEQ ID NO: 172221 - DNA, 17 bp, Arabidopsis thaliana
agctgtatttgctgatc

SEQ ID NO: 172222 - DNA, 17 bp, Arabidopsis thaliana
agctgtatttgctggta

SEQ ID NO: 172223 - DNA, 17 bp, Arabidopsis thaliana
agctgtatttgctggtc

SEQ ID NO: 172224 - DNA, 17 bp, Arabidopsis thaliana
agctgtcgggacccgat

SEQ ID NO: 172225 - DNA, 17 bp, Arabidopsis thaliana
agctgtgatgacgtcat

SEQ ID NO: 172226 - DNA, 17 bp, Arabidopsis thaliana
agctgtgcgaaagggtc

SEQ ID NO: 172227 - DNA, 17 bp, Arabidopsis thaliana
agcttaccccacaccta

SEQ ID NO: 172228 - DNA, 17 bp, Arabidopsis thaliana
agcttaggctcccaaag

SEQ ID NO: 172229 - DNA, 17 bp, Arabidopsis thaliana
agcttatccaggagatg

SEQ ID NO: 172230 - DNA, 17 bp, Arabidopsis thaliana
agcttatctaagcgatt

SEQ ID NO: 172231 - DNA, 17 bp, Arabidopsis thaliana
agcttatgtggcctacc

SEQ ID NO: 172232 - DNA, 17 bp, Arabidopsis thaliana
agcttattgtcttcaag

SEQ ID NO: 172233 - DNA, 17 bp, Arabidopsis thaliana
agcttccgacccattca

SEQ ID NO: 172234 - DNA, 17 bp, Arabidopsis thaliana
agcttccgactcattca

SEQ ID NO: 172235 - DNA, 17 bp, Arabidopsis thaliana
agcttccgtcccgcatc

SEQ ID NO: 172236 - DNA, 17 bp, Arabidopsis thaliana
agcttcctcaagcatta

SEQ ID NO: 172237 - DNA, 17 bp, Arabidopsis thaliana
agcttccttgagtcatt

SEQ ID NO: 172238 - DNA, 17 bp, Arabidopsis thaliana
agcttccttgagtccat

SEQ ID NO: 172239 - DNA, 17 bp, Arabidopsis thaliana
agcttccttgcgtccat

SEQ ID NO: 172240 - DNA, 17 bp, Arabidopsis thaliana
agcttctactgagggtc

SEQ ID NO: 172241 - DNA, 17 bp, Arabidopsis thaliana
agcttctcggtagcgtt

SEQ ID NO: 172242 - DNA, 17 bp, Arabidopsis thaliana
agcttgactctagtccg

SEQ ID NO: 172243 - DNA, 17 bp, Arabidopsis thaliana
agcttgagaactttatt

SEQ ID NO: 172244 - DNA, 17 bp, Arabidopsis thaliana
agcttgagtagtttctc

SEQ ID NO: 172245 - DNA, 17 bp, Arabidopsis thaliana
agcttgattttccgatg

SEQ ID NO: 172246 - DNA, 17 bp, Arabidopsis thaliana
agcttgccgggcttggc

SEQ ID NO: 172247 - DNA, 17 bp, Arabidopsis thaliana
agcttggactgggcagc

SEQ ID NO: 172248 - DNA, 17 bp, Arabidopsis thaliana
agcttggctctagtccg

SEQ ID NO: 172249 - DNA, 17 bp, Arabidopsis thaliana
agcttgtagaggctgag

SEQ ID NO: 172250 - DNA, 17 bp, Arabidopsis thaliana
agctttcttgagtccat

SEQ ID NO: 172251 - DNA, 17 bp, Arabidopsis thaliana
agctttgagaagctaga

SEQ ID NO: 172252 - DNA, 17 bp, Arabidopsis thaliana
agctttgagtccattca

SEQ ID NO: 172253 - DNA, 17 bp, Arabidopsis thaliana
agctttgcggcttagat

SEQ ID NO: 172254 - DNA, 17 bp, Arabidopsis thaliana
agctttgctcgttcatg

SEQ ID NO: 172255 - DNA, 17 bp, Arabidopsis thaliana
agctttggccgagtggt

SEQ ID NO: 172256 - DNA, 17 bp, Arabidopsis thaliana
agcttttagtcggattt

SEQ ID NO: 172257 - DNA, 17 bp, Arabidopsis thaliana
agcttttcaacagctaa

SEQ ID NO: 172258 - DNA, 17 bp, Arabidopsis thaliana
agcttttgtcgctaaga

SEQ ID NO: 172259 - DNA, 17 bp, Arabidopsis thaliana
agctttttgtcgctaag

SEQ ID NO: 172260 - DNA, 17 bp, Arabidopsis thaliana
aggaaaaccccattcat

SEQ ID NO: 172261 - DNA, 17 bp, Arabidopsis thaliana
aggaaaatcaatccaaa

SEQ ID NO: 172262 - DNA, 17 bp, Arabidopsis thaliana
aggaaactggaaaataa

SEQ ID NO: 172263 - DNA, 17 bp, Arabidopsis thaliana
aggaaagctcgaaccca

SEQ ID NO: 172264 - DNA, 17 bp, Arabidopsis thaliana
aggaaagctcgaaccct

SEQ ID NO: 172265 - DNA, 17 bp, Arabidopsis thaliana
aggaaataggagtggca

SEQ ID NO: 172266 - DNA, 17 bp, Arabidopsis thaliana
aggaacaaaataaggaa

SEQ ID NO: 172267 - DNA, 17 bp, Arabidopsis thaliana
aggaacaattggagatt

SEQ ID NO: 172268 - DNA, 17 bp, Arabidopsis thaliana
aggaaccgttgattcgc

SEQ ID NO: 172269 - DNA, 17 bp, Arabidopsis thaliana
aggaagattcttcaact

SEQ ID NO: 172270 - DNA, 17 bp, Arabidopsis thaliana
aggaaggcagcaggccc

SEQ ID NO: 172271 - DNA, 17 bp, Arabidopsis thaliana
aggaagttgctgcgatt

SEQ ID NO: 172272 - DNA, 17 bp, Arabidopsis thaliana
aggaatatgaggattca

SEQ ID NO: 172273 - DNA, 17 bp, Arabidopsis thaliana
aggaatcgtcgaccggg

SEQ ID NO: 172274 - DNA, 17 bp, Arabidopsis thaliana
aggaatgcttctgattc

SEQ ID NO: 172275 - DNA, 17 bp, Arabidopsis thaliana
aggacagattggagtta

SEQ ID NO: 172276 - DNA, 17 bp, Arabidopsis thaliana
aggacattcctgttgat

SEQ ID NO: 172277 - DNA, 17 bp, Arabidopsis thaliana
aggaccaagttgttctg

SEQ ID NO: 172278 - DNA, 17 bp, Arabidopsis thaliana
aggaccaatgcggttgt

SEQ ID NO: 172279 - DNA, 17 bp, Arabidopsis thaliana
aggaccactgcggttgt

SEQ ID NO: 172280 - DNA, 17 bp, Arabidopsis thaliana
aggaccagcatctggaa

SEQ ID NO: 172281 - DNA, 17 bp, Arabidopsis thaliana
aggaccatcgcggttgt

SEQ ID NO: 172282 - DNA, 17 bp, Arabidopsis thaliana
aggaccattgcggttgt

SEQ ID NO: 172283 - DNA, 17 bp, Arabidopsis thaliana
aggaccgaagtggggaa

SEQ ID NO: 172284 - DNA, 17 bp, Arabidopsis thaliana
aggaccgagtgccgccc

SEQ ID NO: 172285 - DNA, 17 bp, Arabidopsis thaliana
aggaccgagtgccgctc

SEQ ID NO: 172286 - DNA, 17 bp, Arabidopsis thaliana
aggacctcgttgcatgc

SEQ ID NO: 172287 - DNA, 17 bp, Arabidopsis thaliana
aggacgcataacataca

SEQ ID NO: 172288 - DNA, 17 bp, Arabidopsis thaliana
aggacgcataacatact

SEQ ID NO: 172289 - DNA, 17 bp, Arabidopsis thaliana
aggactccgctggcacc

SEQ ID NO: 172290 - DNA, 17 bp, Arabidopsis thaliana
aggagcgcagcagagga

SEQ ID NO: 172291 - DNA, 17 bp, Arabidopsis thaliana
aggaggactggtcgtct

SEQ ID NO: 172292 - DNA, 17 bp, Arabidopsis thaliana
aggaggtcagaggataa

SEQ ID NO: 172293 - DNA, 17 bp, Arabidopsis thaliana
aggagtaaacgcagacg

SEQ ID NO: 172294 - DNA, 17 bp, Arabidopsis thaliana
aggagtatagccaagtg

SEQ ID NO: 172295 - DNA, 17 bp, Arabidopsis thaliana
aggagtggagcctgcga

SEQ ID NO: 172296 - DNA, 17 bp, Arabidopsis thaliana
aggagtggagcctgcgg

SEQ ID NO: 172297 - DNA, 17 bp, Arabidopsis thaliana
aggagtggcaccgtggg

SEQ ID NO: 172298 - DNA, 17 bp, Arabidopsis thaliana
aggagtgggcaggggcg

SEQ ID NO: 172299 - DNA, 17 bp, Arabidopsis thaliana
aggagttaaaacagaga

SEQ ID NO: 172300 - DNA, 17 bp, Arabidopsis thaliana
aggatagtggcctacca

SEQ ID NO: 172301 - DNA, 17 bp, Arabidopsis thaliana
aggatccattggagggc

SEQ ID NO: 172302 - DNA, 17 bp, Arabidopsis thaliana
aggatcgcggcgacgtg

SEQ ID NO: 172303 - DNA, 17 bp, Arabidopsis thaliana
aggatcgttttgataaa

SEQ ID NO: 172304 - DNA, 17 bp, Arabidopsis thaliana
aggatcttctctgatac

SEQ ID NO: 172305 - DNA, 17 bp, Arabidopsis thaliana
aggatcttgatgatgct

SEQ ID NO: 172306 - DNA, 17 bp, Arabidopsis thaliana
aggatgcgactaagacg

SEQ ID NO: 172307 - DNA, 17 bp, Arabidopsis thaliana
aggatggcgtcgtggcc

SEQ ID NO: 172308 - DNA, 17 bp, Arabidopsis thaliana
aggatggtgagggacga

SEQ ID NO: 172309 - DNA, 17 bp, Arabidopsis thaliana
aggattccacaactccg

SEQ ID NO: 172310 - DNA, 17 bp, Arabidopsis thaliana
aggattctacccgccgc

SEQ ID NO: 172311 - DNA, 17 bp, Arabidopsis thaliana
aggattggctgagggct

SEQ ID NO: 172312 - DNA, 17 bp, Arabidopsis thaliana
aggatttctgctgtgtc

SEQ ID NO: 172313 - DNA, 17 bp, Arabidopsis thaliana
aggatttgaactataaa

SEQ ID NO: 172314 - DNA, 17 bp, Arabidopsis thaliana
aggatttgtgttacttt

SEQ ID NO: 172315 - DNA, 17 bp, Arabidopsis thaliana
aggcaaaagacttgctc

SEQ ID NO: 172316 - DNA, 17 bp, Arabidopsis thaliana
aggcaacttatgaggga

SEQ ID NO: 172317 - DNA, 17 bp, Arabidopsis thaliana
aggcaactttcggtacc

SEQ ID NO: 172318 - DNA, 17 bp, Arabidopsis thaliana
aggcacactgatgctga

SEQ ID NO: 172319 - DNA, 17 bp, Arabidopsis thaliana
aggcacagctgtgatca

SEQ ID NO: 172320 - DNA, 17 bp, Arabidopsis thaliana
aggcacagtaccttcgt

SEQ ID NO: 172321 - DNA, 17 bp, Arabidopsis thaliana
aggcaccgctaccgtca

SEQ ID NO: 172322 - DNA, 17 bp, Arabidopsis thaliana
aggcagaacccaaatgg

SEQ ID NO: 172323 - DNA, 17 bp, Arabidopsis thaliana
aggcagcggttcatcca

SEQ ID NO: 172324 - DNA, 17 bp, Arabidopsis thaliana
aggcagcggttcatcga

SEQ ID NO: 172325 - DNA, 17 bp, Arabidopsis thaliana
aggcaggccaatgtgga

SEQ ID NO: 172326 - DNA, 17 bp, Arabidopsis thaliana
aggcaggcgtccttccc

SEQ ID NO: 172327 - DNA, 17 bp, Arabidopsis thaliana
aggcagggcggacaggt

SEQ ID NO: 172328 - DNA, 17 bp, Arabidopsis thaliana
aggcagtcactttggct

SEQ ID NO: 172329 - DNA, 17 bp, Arabidopsis thaliana
aggcagtctccttggct

SEQ ID NO: 172330 - DNA, 17 bp, Arabidopsis thaliana
aggcagtctctctggct

SEQ ID NO: 172331 - DNA, 17 bp, Arabidopsis thaliana
aggcagtctctttggct

SEQ ID NO: 172332 - DNA, 17 bp, Arabidopsis thaliana
aggcagtctttttggct

SEQ ID NO: 172333 - DNA, 17 bp, Arabidopsis thaliana
aggcagtgatgattaaa

SEQ ID NO: 172334 - DNA, 17 bp, Arabidopsis thaliana
aggcagttcctttggct

SEQ ID NO: 172335 - DNA, 17 bp, Arabidopsis thaliana
aggcagttggcgtcgtc

SEQ ID NO: 172336 - DNA, 17 bp, Arabidopsis thaliana
aggcataacctctgacc

SEQ ID NO: 172337 - DNA, 17 bp, Arabidopsis thaliana
aggcatatcctctgacc

SEQ ID NO: 172338 - DNA, 17 bp, Arabidopsis thaliana
aggccaacacttgctcc

SEQ ID NO: 172339 - DNA, 17 bp, Arabidopsis thaliana
aggccaacggttcatgg

SEQ ID NO: 172340 - DNA, 17 bp, Arabidopsis thaliana
aggccaaggaagtttga

SEQ ID NO: 172341 - DNA, 17 bp, Arabidopsis thaliana
aggccagagatttgatt

SEQ ID NO: 172342 - DNA, 17 bp, Arabidopsis thaliana
aggccaggatttctgct

SEQ ID NO: 172343 - DNA, 17 bp, Arabidopsis thaliana
aggccatgcgatccgtc

SEQ ID NO: 172344 - DNA, 17 bp, Arabidopsis thaliana
aggccattatcgggtta

SEQ ID NO: 172345 - DNA, 17 bp, Arabidopsis thaliana
aggcccaggaacttggt

SEQ ID NO: 172346 - DNA, 17 bp, Arabidopsis thaliana
aggcccaggatagttga

SEQ ID NO: 172347 - DNA, 17 bp, Arabidopsis thaliana
aggcccggggtcttgtc

SEQ ID NO: 172348 - DNA, 17 bp, Arabidopsis thaliana
aggcccgggtaatcttg

SEQ ID NO: 172349 - DNA, 17 bp, Arabidopsis thaliana
aggccctaaaccctggt

SEQ ID NO: 172350 - DNA, 17 bp, Arabidopsis thaliana
aggccgacattctgctc

SEQ ID NO: 172351 - DNA, 17 bp, Arabidopsis thaliana
aggccgagctccgtcac

SEQ ID NO: 172352 - DNA, 17 bp, Arabidopsis thaliana
aggccgtggcatgcgca

SEQ ID NO: 172353 - DNA, 17 bp, Arabidopsis thaliana
aggcctccattatgacc

SEQ ID NO: 172354 - DNA, 17 bp, Arabidopsis thaliana
aggcctccgttatgacc

SEQ ID NO: 172355 - DNA, 17 bp, Arabidopsis thaliana
aggcctgaccggaagaa

SEQ ID NO: 172356 - DNA, 17 bp, Arabidopsis thaliana
aggcctggctggccggt

SEQ ID NO: 172357 - DNA, 17 bp, Arabidopsis thaliana
aggcctttggcgcaaag

SEQ ID NO: 172358 - DNA, 17 bp, Arabidopsis thaliana
aggccttttcttgacct

SEQ ID NO: 172359 - DNA, 17 bp, Arabidopsis thaliana
aggcgacggatggcgaa

SEQ ID NO: 172360 - DNA, 17 bp, Arabidopsis thaliana
aggcgcacggaggattc

SEQ ID NO: 172361 - DNA, 17 bp, Arabidopsis thaliana
aggcgcagcagttgact

SEQ ID NO: 172362 - DNA, 17 bp, Arabidopsis thaliana
aggcgggtccgaccttc

SEQ ID NO: 172363 - DNA, 17 bp, Arabidopsis thaliana
aggcggtcacaaagcaa

SEQ ID NO: 172364 - DNA, 17 bp, Arabidopsis thaliana
aggcggtccgaacgacg

SEQ ID NO: 172365 - DNA, 17 bp, Arabidopsis thaliana
aggcggtttcgcaggcg

SEQ ID NO: 172366 - DNA, 17 bp, Arabidopsis thaliana
aggcgttctcgactctg

SEQ ID NO: 172367 - DNA, 17 bp, Arabidopsis thaliana
aggctaaatacgggcga

SEQ ID NO: 172368 - DNA, 17 bp, Arabidopsis thaliana
aggctatatggctactc

SEQ ID NO: 172369 - DNA, 17 bp, Arabidopsis thaliana
aggctcaagacccacta

SEQ ID NO: 172370 - DNA, 17 bp, Arabidopsis thaliana
aggctcaggagggatag

SEQ ID NO: 172371 - DNA, 17 bp, Arabidopsis thaliana
aggctcccaaaggcacg

SEQ ID NO: 172372 - DNA, 17 bp, Arabidopsis thaliana
aggctctgtgttggcgc

SEQ ID NO: 172373 - DNA, 17 bp, Arabidopsis thaliana
aggctgaccgaccgccg

SEQ ID NO: 172374 - DNA, 17 bp, Arabidopsis thaliana
aggctgaggtctcgttc

SEQ ID NO: 172375 - DNA, 17 bp, Arabidopsis thaliana
aggctgtccttcgttct

SEQ ID NO: 172376 - DNA, 17 bp, Arabidopsis thaliana
aggcttcggcctcgtgt

SEQ ID NO: 172377 - DNA, 17 bp, Arabidopsis thaliana
aggcttgtaatgggtgt

SEQ ID NO: 172378 - DNA, 17 bp, Arabidopsis thaliana
aggctttcaagtttcca

SEQ ID NO: 172379 - DNA, 17 bp, Arabidopsis thaliana
aggctttcttcggtcca

SEQ ID NO: 172380 - DNA, 17 bp, Arabidopsis thaliana
agggaaaaccaactgaa

SEQ ID NO: 172381 - DNA, 17 bp, Arabidopsis thaliana
agggaaaactacgagag

SEQ ID NO: 172382 - DNA, 17 bp, Arabidopsis thaliana
agggaacaagcagagaa

SEQ ID NO: 172383 - DNA, 17 bp, Arabidopsis thaliana
agggaacctgcggaagg

SEQ ID NO: 172384 - DNA, 17 bp, Arabidopsis thaliana
agggaacgggcttggca

SEQ ID NO: 172385 - DNA, 17 bp, Arabidopsis thaliana
agggaacgtgagctggg

SEQ ID NO: 172386 - DNA, 17 bp, Arabidopsis thaliana
agggacagtcgggggca

SEQ ID NO: 172387 - DNA, 17 bp, Arabidopsis thaliana
agggacgaaatcgtggc

SEQ ID NO: 172388 - DNA, 17 bp, Arabidopsis thaliana
agggacgcagacgtggg

SEQ ID NO: 172389 - DNA, 17 bp, Arabidopsis thaliana
agggacgtagtcaacgc

SEQ ID NO: 172390 - DNA, 17 bp, Arabidopsis thaliana
agggagggacttatgtc

SEQ ID NO: 172391 - DNA, 17 bp, Arabidopsis thaliana
agggataacagttctca

SEQ ID NO: 172392 - DNA, 17 bp, Arabidopsis thaliana
agggataactggcttgt

SEQ ID NO: 172393 - DNA, 17 bp, Arabidopsis thaliana
agggatctcgtggttgt

SEQ ID NO: 172394 - DNA, 17 bp, Arabidopsis thaliana
agggatgcctccacgta

SEQ ID NO: 172395 - DNA, 17 bp, Arabidopsis thaliana
agggatgggtgtaggga

SEQ ID NO: 172396 - DNA, 17 bp, Arabidopsis thaliana
agggatgtagcgcagca

SEQ ID NO: 172397 - DNA, 17 bp, Arabidopsis thaliana
agggatgtagcgcagct

SEQ ID NO: 172398 - DNA, 17 bp, Arabidopsis thaliana
agggattagtgcaacga

SEQ ID NO: 172399 - DNA, 17 bp, Arabidopsis thaliana
agggcaagtctggtgcc

SEQ ID NO: 172400 - DNA, 17 bp, Arabidopsis thaliana
agggcacgtccgcctgg

SEQ ID NO: 172401 - DNA, 17 bp, Arabidopsis thaliana
agggcacgtctgcctgg

SEQ ID NO: 172402 - DNA, 17 bp, Arabidopsis thaliana
agggcagcgttgaagaa

SEQ ID NO: 172403 - DNA, 17 bp, Arabidopsis thaliana
agggcatcacagaccta

SEQ ID NO: 172404 - DNA, 17 bp, Arabidopsis thaliana
agggcatcacagacctg

SEQ ID NO: 172405 - DNA, 17 bp, Arabidopsis thaliana
agggccaccgccggtgt

SEQ ID NO: 172406 - DNA, 17 bp, Arabidopsis thaliana
agggccataggttcgaa

SEQ ID NO: 172407 - DNA, 17 bp, Arabidopsis thaliana
agggcctcttccagata

SEQ ID NO: 172408 - DNA, 17 bp, Arabidopsis thaliana
agggccttgaagtatct

SEQ ID NO: 172409 - DNA, 17 bp, Arabidopsis thaliana
agggcgtgggttcatat

SEQ ID NO: 172410 - DNA, 17 bp, Arabidopsis thaliana
agggctatagctcagtt

SEQ ID NO: 172411 - DNA, 17 bp, Arabidopsis thaliana
agggctcctcaggtgtt

SEQ ID NO: 172412 - DNA, 17 bp, Arabidopsis thaliana
agggctgggctcggggg

SEQ ID NO: 172413 - DNA, 17 bp, Arabidopsis thaliana
agggcttgccaacgacc

SEQ ID NO: 172414 - DNA, 17 bp, Arabidopsis thaliana
agggctttgtcatccat

SEQ ID NO: 172415 - DNA, 17 bp, Arabidopsis thaliana
agggcttttttttgttt

SEQ ID NO: 172416 - DNA, 17 bp, Arabidopsis thaliana
aggggaaagggctttta

SEQ ID NO: 172417 - DNA, 17 bp, Arabidopsis thaliana
aggggaacctttttgta

SEQ ID NO: 172418 - DNA, 17 bp, Arabidopsis thaliana
aggggaacttttttgta

SEQ ID NO: 172419 - DNA, 17 bp, Arabidopsis thaliana
agggggccttcaggtct

SEQ ID NO: 172420 - DNA, 17 bp, Arabidopsis thaliana
aggggtgaaatctacag

SEQ ID NO: 172421 - DNA, 17 bp, Arabidopsis thaliana
agggtaggctgccgcgg

SEQ ID NO: 172422 - DNA, 17 bp, Arabidopsis thaliana
agggtccagcggctgga

SEQ ID NO: 172423 - DNA, 17 bp, Arabidopsis thaliana
agggtccgggcacgacg

SEQ ID NO: 172424 - DNA, 17 bp, Arabidopsis thaliana
agggtcgaatcttagcc

SEQ ID NO: 172425 - DNA, 17 bp, Arabidopsis thaliana
agggtcgaatcttagcg

SEQ ID NO: 172426 - DNA, 17 bp, Arabidopsis thaliana
agggtctctcggactag

SEQ ID NO: 172427 - DNA, 17 bp, Arabidopsis thaliana
agggtgactcgccacaa

SEQ ID NO: 172428 - DNA, 17 bp, Arabidopsis thaliana
agggtgatgaacgaaat

SEQ ID NO: 172429 - DNA, 17 bp, Arabidopsis thaliana
agggttccgccgtcctg

SEQ ID NO: 172430 - DNA, 17 bp, Arabidopsis thaliana
agggttcgtttccctgg

SEQ ID NO: 172431 - DNA, 17 bp, Arabidopsis thaliana
agggtttagaacttgat

SEQ ID NO: 172432 - DNA, 17 bp, Arabidopsis thaliana
agggtttgatcggatcc

SEQ ID NO: 172433 - DNA, 17 bp, Arabidopsis thaliana
agggtttggaaattgaa

SEQ ID NO: 172434 - DNA, 17 bp, Arabidopsis thaliana
aggtaaatgttggtcac

SEQ ID NO: 172435 - DNA, 17 bp, Arabidopsis thaliana
aggtaagagtaccgggg

SEQ ID NO: 172436 - DNA, 17 bp, Arabidopsis thaliana
aggtacaaacaggacag

SEQ ID NO: 172437 - DNA, 17 bp, Arabidopsis thaliana
aggtacaggttggcggt

SEQ ID NO: 172438 - DNA, 17 bp, Arabidopsis thaliana
aggtactctgagccaac

SEQ ID NO: 172439 - DNA, 17 bp, Arabidopsis thaliana
aggtagaatcctttgca

SEQ ID NO: 172440 - DNA, 17 bp, Arabidopsis thaliana
aggtagctcatccggaa

SEQ ID NO: 172441 - DNA, 17 bp, Arabidopsis thaliana
aggtatatggttgtgtg

SEQ ID NO: 172442 - DNA, 17 bp, Arabidopsis thaliana
aggtatcgacaatgatc

SEQ ID NO: 172443 - DNA, 17 bp, Arabidopsis thaliana
aggtcaagaaaaaaaaa

SEQ ID NO: 172444 - DNA, 17 bp, Arabidopsis thaliana
aggtcaagaaaaaaaga

SEQ ID NO: 172445 - DNA, 17 bp, Arabidopsis thaliana
aggtccaagatatccac

SEQ ID NO: 172446 - DNA, 17 bp, Arabidopsis thaliana
aggtcccgagttcggtt

SEQ ID NO: 172447 - DNA, 17 bp, Arabidopsis thaliana
aggtccctactgaatta

SEQ ID NO: 172448 - DNA, 17 bp, Arabidopsis thaliana
aggtccctactgaattg

SEQ ID NO: 172449 - DNA, 17 bp, Arabidopsis thaliana
aggtcctctttttgcgt

SEQ ID NO: 172450 - DNA, 17 bp, Arabidopsis thaliana
aggtcgacacgggctct

SEQ ID NO: 172451 - DNA, 17 bp, Arabidopsis thaliana
aggtcgacgcgggctct

SEQ ID NO: 172452 - DNA, 17 bp, Arabidopsis thaliana
aggtctccaaggtgaac

SEQ ID NO: 172453 - DNA, 17 bp, Arabidopsis thaliana
aggtctcggtgggacct

SEQ ID NO: 172454 - DNA, 17 bp, Arabidopsis thaliana
aggtctcgttcgttaag

SEQ ID NO: 172455 - DNA, 17 bp, Arabidopsis thaliana
aggtctgtgacagtatt

SEQ ID NO: 172456 - DNA, 17 bp, Arabidopsis thaliana
aggtctgtgatgcccta

SEQ ID NO: 172457 - DNA, 17 bp, Arabidopsis thaliana
aggtctgtgatgccctt

SEQ ID NO: 172458 - DNA, 17 bp, Arabidopsis thaliana
aggtgaacctgcggaag

SEQ ID NO: 172459 - DNA, 17 bp, Arabidopsis thaliana
aggtgatattgatttgg

SEQ ID NO: 172460 - DNA, 17 bp, Arabidopsis thaliana
aggtgatgtcgaagttg

SEQ ID NO: 172461 - DNA, 17 bp, Arabidopsis thaliana
aggtggacctgcggaag

SEQ ID NO: 172462 - DNA, 17 bp, Arabidopsis thaliana
aggtggccgtggccgtg

SEQ ID NO: 172463 - DNA, 17 bp, Arabidopsis thaliana
aggtgggcatactgcca

SEQ ID NO: 172464 - DNA, 17 bp, Arabidopsis thaliana
aggtgggcttggaagca

SEQ ID NO: 172465 - DNA, 17 bp, Arabidopsis thaliana
aggtggttgttgacgaa

SEQ ID NO: 172466 - DNA, 17 bp, Arabidopsis thaliana
aggtggttttgactatc

SEQ ID NO: 172467 - DNA, 17 bp, Arabidopsis thaliana
aggtgtaagtgactgta

SEQ ID NO: 172468 - DNA, 17 bp, Arabidopsis thaliana
aggtgtagcgaagaagc

SEQ ID NO: 172469 - DNA, 17 bp, Arabidopsis thaliana
aggtgtaggataagtga

SEQ ID NO: 172470 - DNA, 17 bp, Arabidopsis thaliana
aggtgtaggataagtgg

SEQ ID NO: 172471 - DNA, 17 bp, Arabidopsis thaliana
aggtgtcctaagatgag

SEQ ID NO: 172472 - DNA, 17 bp, Arabidopsis thaliana
aggtgtcctaagggggg

SEQ ID NO: 172473 - DNA, 17 bp, Arabidopsis thaliana
aggtgttgccatgggcg

SEQ ID NO: 172474 - DNA, 17 bp, Arabidopsis thaliana
aggtgttgtgaagtcta

SEQ ID NO: 172475 - DNA, 17 bp, Arabidopsis thaliana
aggttcaaaccactgtg

SEQ ID NO: 172476 - DNA, 17 bp, Arabidopsis thaliana
aggttcaagaacggatc

SEQ ID NO: 172477 - DNA, 17 bp, Arabidopsis thaliana
aggttcacctacggaaa

SEQ ID NO: 172478 - DNA, 17 bp, Arabidopsis thaliana
aggttcgaatcctgtca

SEQ ID NO: 172479 - DNA, 17 bp, Arabidopsis thaliana
aggttcgtattgaagca

SEQ ID NO: 172480 - DNA, 17 bp, Arabidopsis thaliana
aggttggcggtgtcctc

SEQ ID NO: 172481 - DNA, 17 bp, Arabidopsis thaliana
aggtttagtggacttct

SEQ ID NO: 172482 - DNA, 17 bp, Arabidopsis thaliana
aggtttcgctgttgaca

SEQ ID NO: 172483 - DNA, 17 bp, Arabidopsis thaliana
aggttttgcagcgaccg

SEQ ID NO: 172484 - DNA, 17 bp, Arabidopsis thaliana
aggtttttcttagagga

SEQ ID NO: 172485 - DNA, 17 bp, Arabidopsis thaliana
aggtttttcttagaggg

SEQ ID NO: 172486 - DNA, 17 bp, Arabidopsis thaliana
aggttttttcattattt

SEQ ID NO: 172487 - DNA, 17 bp, Arabidopsis thaliana
agtaaacaaaaattgta

SEQ ID NO: 172488 - DNA, 17 bp, Arabidopsis thaliana
agtaaacgaagcatcta

SEQ ID NO: 172489 - DNA, 17 bp, Arabidopsis thaliana
agtaaacgttggatata

SEQ ID NO: 172490 - DNA, 17 bp, Arabidopsis thaliana
agtaaatgagattttca

SEQ ID NO: 172491 - DNA, 17 bp, Arabidopsis thaliana
agtaaatttttttgtct

SEQ ID NO: 172492 - DNA, 17 bp, Arabidopsis thaliana
agtaacacaatttgata

SEQ ID NO: 172493 - DNA, 17 bp, Arabidopsis thaliana
agtaacggcgagcgaac

SEQ ID NO: 172494 - DNA, 17 bp, Arabidopsis thaliana
agtaagatggatcttga

SEQ ID NO: 172495 - DNA, 17 bp, Arabidopsis thaliana
agtaaggattgacagac

SEQ ID NO: 172496 - DNA, 17 bp, Arabidopsis thaliana
agtaagttggatcttga

SEQ ID NO: 172497 - DNA, 17 bp, Arabidopsis thaliana
agtaatattctcgggac

SEQ ID NO: 172498 - DNA, 17 bp, Arabidopsis thaliana
agtacagacccgggttc

SEQ ID NO: 172499 - DNA, 17 bp, Arabidopsis thaliana
agtacatctcaaggctt

SEQ ID NO: 172500 - DNA, 17 bp, Arabidopsis thaliana
agtaccggggaagtatc

SEQ ID NO: 172501 - DNA, 17 bp, Arabidopsis thaliana
agtacgaatacgaaccg

SEQ ID NO: 172502 - DNA, 17 bp, Arabidopsis thaliana
agtacgagaggaaccga

SEQ ID NO: 172503 - DNA, 17 bp, Arabidopsis thaliana
agtacgagaggaaccgt

SEQ ID NO: 172504 - DNA, 17 bp, Arabidopsis thaliana
agtacgagttgattcaa

SEQ ID NO: 172505 - DNA, 17 bp, Arabidopsis thaliana
agtactaagtaacacaa

SEQ ID NO: 172506 - DNA, 17 bp, Arabidopsis thaliana
agtactaggatgggtga

SEQ ID NO: 172507 - DNA, 17 bp, Arabidopsis thaliana
agtactgatgatgctga

SEQ ID NO: 172508 - DNA, 17 bp, Arabidopsis thaliana
agtacttgccttgtgtc

SEQ ID NO: 172509 - DNA, 17 bp, Arabidopsis thaliana
agtagatcgacaacaga

SEQ ID NO: 172510 - DNA, 17 bp, Arabidopsis thaliana
agtagcgcagcggaagc

SEQ ID NO: 172511 - DNA, 17 bp, Arabidopsis thaliana
agtaggagcttaggctc

SEQ ID NO: 172512 - DNA, 17 bp, Arabidopsis thaliana
agtaggagggcgcggcg

SEQ ID NO: 172513 - DNA, 17 bp, Arabidopsis thaliana
agtaggcccaggataga

SEQ ID NO: 172514 - DNA, 17 bp, Arabidopsis thaliana
agtaggcccaggatagc

SEQ ID NO: 172515 - DNA, 17 bp, Arabidopsis thaliana
agtaggcccaggatagt

SEQ ID NO: 172516 - DNA, 17 bp, Arabidopsis thaliana
agtagtactaggatggg

SEQ ID NO: 172517 - DNA, 17 bp, Arabidopsis thaliana
agtagtcatatagccta

SEQ ID NO: 172518 - DNA, 17 bp, Arabidopsis thaliana
agtagtttctctccgag

SEQ ID NO: 172519 - DNA, 17 bp, Arabidopsis thaliana
agtatcttatgcgtcct

SEQ ID NO: 172520 - DNA, 17 bp, Arabidopsis thaliana
agtatcttgatgatgca

SEQ ID NO: 172521 - DNA, 17 bp, Arabidopsis thaliana
agtatcttgatgatgct

SEQ ID NO: 172522 - DNA, 17 bp, Arabidopsis thaliana
agtatgaacgaattcag

SEQ ID NO: 172523 - DNA, 17 bp, Arabidopsis thaliana
agtatgagagggataaa

SEQ ID NO: 172524 - DNA, 17 bp, Arabidopsis thaliana
agtatgatcccaaaacc

SEQ ID NO: 172525 - DNA, 17 bp, Arabidopsis thaliana
agtatgccgctgaagag

SEQ ID NO: 172526 - DNA, 17 bp, Arabidopsis thaliana
agtatggcaaggcgaca

SEQ ID NO: 172527 - DNA, 17 bp, Arabidopsis thaliana
agtatggtcgcaaggct

SEQ ID NO: 172528 - DNA, 17 bp, Arabidopsis thaliana
agtatgttatgcgtcct

SEQ ID NO: 172529 - DNA, 17 bp, Arabidopsis thaliana
agtattcccgcctgtca

SEQ ID NO: 172530 - DNA, 17 bp, Arabidopsis thaliana
agtattgaccaaaaaaa

SEQ ID NO: 172531 - DNA, 17 bp, Arabidopsis thaliana
agtattgaccaaaaaat

SEQ ID NO: 172532 - DNA, 17 bp, Arabidopsis thaliana
agtattgtaagtcacta

SEQ ID NO: 172533 - DNA, 17 bp, Arabidopsis thaliana
agtcaaagcaatttggt

SEQ ID NO: 172534 - DNA, 17 bp, Arabidopsis thaliana
agtcaaaggatgttctt

SEQ ID NO: 172535 - DNA, 17 bp, Arabidopsis thaliana
agtcagattccccgatc

SEQ ID NO: 172536 - DNA, 17 bp, Arabidopsis thaliana
agtcaggatgattgtgt

SEQ ID NO: 172537 - DNA, 17 bp, Arabidopsis thaliana
agtcagggcagcgtcga

SEQ ID NO: 172538 - DNA, 17 bp, Arabidopsis thaliana
agtcagggcctaagata

SEQ ID NO: 172539 - DNA, 17 bp, Arabidopsis thaliana
agtcataatccagcgca

SEQ ID NO: 172540 - DNA, 17 bp, Arabidopsis thaliana
agtcatcagcaaccgca

SEQ ID NO: 172541 - DNA, 17 bp, Arabidopsis thaliana
agtcatcagctcgcgtt

SEQ ID NO: 172542 - DNA, 17 bp, Arabidopsis thaliana
agtcatccttggctaga

SEQ ID NO: 172543 - DNA, 17 bp, Arabidopsis thaliana
agtcatccttggctcag

SEQ ID NO: 172544 - DNA, 17 bp, Arabidopsis thaliana
agtcatccttggctgga

SEQ ID NO: 172545 - DNA, 17 bp, Arabidopsis thaliana
agtccaaaaaaaattgt

SEQ ID NO: 172546 - DNA, 17 bp, Arabidopsis thaliana
agtccaaaatccttctg

SEQ ID NO: 172547 - DNA, 17 bp, Arabidopsis thaliana
agtccaaagatccatct

SEQ ID NO: 172548 - DNA, 17 bp, Arabidopsis thaliana
agtccaacaataggcta

SEQ ID NO: 172549 - DNA, 17 bp, Arabidopsis thaliana
agtccaagatccatctg

SEQ ID NO: 172550 - DNA, 17 bp, Arabidopsis thaliana
agtccaaggatccatct

SEQ ID NO: 172551 - DNA, 17 bp, Arabidopsis thaliana
agtccaatcgatccatc

SEQ ID NO: 172552 - DNA, 17 bp, Arabidopsis thaliana
agtccatcctgtagata

SEQ ID NO: 172553 - DNA, 17 bp, Arabidopsis thaliana
agtccatcctgtagatg

SEQ ID NO: 172554 - DNA, 17 bp, Arabidopsis thaliana
agtcccatcctgtagat

SEQ ID NO: 172555 - DNA, 17 bp, Arabidopsis thaliana
agtccgactttgtgaaa

SEQ ID NO: 172556 - DNA, 17 bp, Arabidopsis thaliana
agtccggagacgtcggc

SEQ ID NO: 172557 - DNA, 17 bp, Arabidopsis thaliana
agtccgtaccccggccg

SEQ ID NO: 172558 - DNA, 17 bp, Arabidopsis thaliana
agtccgtcccccggcca

SEQ ID NO: 172559 - DNA, 17 bp, Arabidopsis thaliana
agtccgtcccccggccg

SEQ ID NO: 172560 - DNA, 17 bp, Arabidopsis thaliana
agtccgttcggcggaag

SEQ ID NO: 172561 - DNA, 17 bp, Arabidopsis thaliana
agtcctcagctcgcgtt

SEQ ID NO: 172562 - DNA, 17 bp, Arabidopsis thaliana
agtcctcgtgttgcatc

SEQ ID NO: 172563 - DNA, 17 bp, Arabidopsis thaliana
agtcctgttgtgcgata

SEQ ID NO: 172564 - DNA, 17 bp, Arabidopsis thaliana
agtcgaaatccgctaag

SEQ ID NO: 172565 - DNA, 17 bp, Arabidopsis thaliana
agtcgacctccagggag

SEQ ID NO: 172566 - DNA, 17 bp, Arabidopsis thaliana
agtcgagaagcatcaca

SEQ ID NO: 172567 - DNA, 17 bp, Arabidopsis thaliana
agtcgatcctgtaggat

SEQ ID NO: 172568 - DNA, 17 bp, Arabidopsis thaliana
agtcgatgactattcaa

SEQ ID NO: 172569 - DNA, 17 bp, Arabidopsis thaliana
agtcgcaacctgtagat

SEQ ID NO: 172570 - DNA, 17 bp, Arabidopsis thaliana
agtcgcaacctgtagga

SEQ ID NO: 172571 - DNA, 17 bp, Arabidopsis thaliana
agtcgcaccctgtagat

SEQ ID NO: 172572 - DNA, 17 bp, Arabidopsis thaliana
agtcgcacctgtagata

SEQ ID NO: 172573 - DNA, 17 bp, Arabidopsis thaliana
agtcgcacctgtagatg

SEQ ID NO: 172574 - DNA, 17 bp, Arabidopsis thaliana
agtcgcactgtagatgg

SEQ ID NO: 172575 - DNA, 17 bp, Arabidopsis thaliana
agtcgcagcctgtagat

SEQ ID NO: 172576 - DNA, 17 bp, Arabidopsis thaliana
agtcgcatcccgtagat

SEQ ID NO: 172577 - DNA, 17 bp, Arabidopsis thaliana
agtcgcatccgcagata

SEQ ID NO: 172578 - DNA, 17 bp, Arabidopsis thaliana
agtcgcatccgtagata

SEQ ID NO: 172579 - DNA, 17 bp, Arabidopsis thaliana
agtcgcatcctgagatg

SEQ ID NO: 172580 - DNA, 17 bp, Arabidopsis thaliana
agtcgcatcctgcagat

SEQ ID NO: 172581 - DNA, 17 bp, Arabidopsis thaliana
agtcgcatcctgtaaat

SEQ ID NO: 172582 - DNA, 17 bp, Arabidopsis thaliana
agtcgcatcctgtaaga

SEQ ID NO: 172583 - DNA, 17 bp, Arabidopsis thaliana
agtcgcatcctgtagaa

SEQ ID NO: 172584 - DNA, 17 bp, Arabidopsis thaliana
agtcgcatcctgtagac

SEQ ID NO: 172585 - DNA, 17 bp, Arabidopsis thaliana
agtcgcatcctgtagag

SEQ ID NO: 172586 - DNA, 17 bp, Arabidopsis thaliana
agtcgcatcctgtagat

SEQ ID NO: 172587 - DNA, 17 bp, Arabidopsis thaliana
agtcgcatcctgtagga

SEQ ID NO: 172588 - DNA, 17 bp, Arabidopsis thaliana
agtcgcatcctgtagtg

SEQ ID NO: 172589 - DNA, 17 bp, Arabidopsis thaliana
agtcgcatcctgtatat

SEQ ID NO: 172590 - DNA, 17 bp, Arabidopsis thaliana
agtcgcatcctgtgatg

SEQ ID NO: 172591 - DNA, 17 bp, Arabidopsis thaliana
agtcgcatcctgtggat

SEQ ID NO: 172592 - DNA, 17 bp, Arabidopsis thaliana
agtcgcatcctgttaga

SEQ ID NO: 172593 - DNA, 17 bp, Arabidopsis thaliana
agtcgcatctgtagata

SEQ ID NO: 172594 - DNA, 17 bp, Arabidopsis thaliana
agtcgcatctgtagatg

SEQ ID NO: 172595 - DNA, 17 bp, Arabidopsis thaliana
agtcgcatctgtagtat

SEQ ID NO: 172596 - DNA, 17 bp, Arabidopsis thaliana
agtcgcatcttgtagat

SEQ ID NO: 172597 - DNA, 17 bp, Arabidopsis thaliana
agtcgcattcctgtaga

SEQ ID NO: 172598 - DNA, 17 bp, Arabidopsis thaliana
agtcgcattctgtagat

SEQ ID NO: 172599 - DNA, 17 bp, Arabidopsis thaliana
agtcgcattgtagatgg

SEQ ID NO: 172600 - DNA, 17 bp, Arabidopsis thaliana
agtcgccctgtagatgg

SEQ ID NO: 172601 - DNA, 17 bp, Arabidopsis thaliana
agtcgcctgtagatgga

SEQ ID NO: 172602 - DNA, 17 bp, Arabidopsis thaliana
agtcgctgtagatggat

SEQ ID NO: 172603 - DNA, 17 bp, Arabidopsis thaliana
agtcgcttccagaccta

SEQ ID NO: 172604 - DNA, 17 bp, Arabidopsis thaliana
agtcggaactgaccgcc

SEQ ID NO: 172605 - DNA, 17 bp, Arabidopsis thaliana
agtcggaaggcggtttc

SEQ ID NO: 172606 - DNA, 17 bp, Arabidopsis thaliana
agtcggaatccttgcca

SEQ ID NO: 172607 - DNA, 17 bp, Arabidopsis thaliana
agtcggcaaaatggata

SEQ ID NO: 172608 - DNA, 17 bp, Arabidopsis thaliana
agtcggcaggatcggcg

SEQ ID NO: 172609 - DNA, 17 bp, Arabidopsis thaliana
agtcggcatcctgtaga

SEQ ID NO: 172610 - DNA, 17 bp, Arabidopsis thaliana
agtcggcctgtagatgg

SEQ ID NO: 172611 - DNA, 17 bp, Arabidopsis thaliana
agtcgtaacaaggtttc

SEQ ID NO: 172612 - DNA, 17 bp, Arabidopsis thaliana
agtcgtcattttgcatc

SEQ ID NO: 172613 - DNA, 17 bp, Arabidopsis thaliana
agtcgtctaaagaacag

SEQ ID NO: 172614 - DNA, 17 bp, Arabidopsis thaliana
agtctaagtcatgctta

SEQ ID NO: 172615 - DNA, 17 bp, Arabidopsis thaliana
agtctacacaatttttg

SEQ ID NO: 172616 - DNA, 17 bp, Arabidopsis thaliana
agtctcaaccataaaca

SEQ ID NO: 172617 - DNA, 17 bp, Arabidopsis thaliana
agtctcatcctgtagat

SEQ ID NO: 172618 - DNA, 17 bp, Arabidopsis thaliana
agtctccaagcccatcg

SEQ ID NO: 172619 - DNA, 17 bp, Arabidopsis thaliana
agtctcggggtggtgag

SEQ ID NO: 172620 - DNA, 17 bp, Arabidopsis thaliana
agtctcggtgacccact

SEQ ID NO: 172621 - DNA, 17 bp, Arabidopsis thaliana
agtctcgtcgtagtttg

SEQ ID NO: 172622 - DNA, 17 bp, Arabidopsis thaliana
agtctcttgtgaattag

SEQ ID NO: 172623 - DNA, 17 bp, Arabidopsis thaliana
agtctgaattcgttcag

SEQ ID NO: 172624 - DNA, 17 bp, Arabidopsis thaliana
agtctgaattcgttcat

SEQ ID NO: 172625 - DNA, 17 bp, Arabidopsis thaliana
agtctgacatgtgtgcg

SEQ ID NO: 172626 - DNA, 17 bp, Arabidopsis thaliana
agtctgcaactttggat

SEQ ID NO: 172627 - DNA, 17 bp, Arabidopsis thaliana
agtctggagaagcgtcc

SEQ ID NO: 172628 - DNA, 17 bp, Arabidopsis thaliana
agtctggcggacgatct

SEQ ID NO: 172629 - DNA, 17 bp, Arabidopsis thaliana
agtctggtcatgtgtgc

SEQ ID NO: 172630 - DNA, 17 bp, Arabidopsis thaliana
agtctggtgccagcagc

SEQ ID NO: 172631 - DNA, 17 bp, Arabidopsis thaliana
agtcttatccccgtaaa

SEQ ID NO: 172632 - DNA, 17 bp, Arabidopsis thaliana
agtcttcaaacctgaga

SEQ ID NO: 172633 - DNA, 17 bp, Arabidopsis thaliana
agtcttcaaacctgagt

SEQ ID NO: 172634 - DNA, 17 bp, Arabidopsis thaliana
agtcttcgaagctgcga

SEQ ID NO: 172635 - DNA, 17 bp, Arabidopsis thaliana
agtcttcgaagctgcgg

SEQ ID NO: 172636 - DNA, 17 bp, Arabidopsis thaliana
agtctttattagtgaga

SEQ ID NO: 172637 - DNA, 17 bp, Arabidopsis thaliana
agtctttgaacgcaagt

SEQ ID NO: 172638 - DNA, 17 bp, Arabidopsis thaliana
agtctttgctctgagca

SEQ ID NO: 172639 - DNA, 17 bp, Arabidopsis thaliana
agtcttttgcaagattc

SEQ ID NO: 172640 - DNA, 17 bp, Arabidopsis thaliana
agtgaacaggttgagtg

SEQ ID NO: 172641 - DNA, 17 bp, Arabidopsis thaliana
agtgaacctctgtagtg

SEQ ID NO: 172642 - DNA, 17 bp, Arabidopsis thaliana
agtgaagggtttggtct

SEQ ID NO: 172643 - DNA, 17 bp, Arabidopsis thaliana
agtgaatcggtccctaa

SEQ ID NO: 172644 - DNA, 17 bp, Arabidopsis thaliana
agtgacgcgcatgaatg

SEQ ID NO: 172645 - DNA, 17 bp, Arabidopsis thaliana
agtgactgtgttgccaa

SEQ ID NO: 172646 - DNA, 17 bp, Arabidopsis thaliana
agtgacttatgataata

SEQ ID NO: 172647 - DNA, 17 bp, Arabidopsis thaliana
agtgacttatgataatc

SEQ ID NO: 172648 - DNA, 17 bp, Arabidopsis thaliana
agtgacttctgatcaca

SEQ ID NO: 172649 - DNA, 17 bp, Arabidopsis thaliana
agtgagacagaggagag

SEQ ID NO: 172650 - DNA, 17 bp, Arabidopsis thaliana
agtgagacgctataact

SEQ ID NO: 172651 - DNA, 17 bp, Arabidopsis thaliana
agtgagaggctttcacg

SEQ ID NO: 172652 - DNA, 17 bp, Arabidopsis thaliana
agtgagatttgggatgt

SEQ ID NO: 172653 - DNA, 17 bp, Arabidopsis thaliana
agtgaggacggtggagc

SEQ ID NO: 172654 - DNA, 17 bp, Arabidopsis thaliana
agtgaggcctcaggatc

SEQ ID NO: 172655 - DNA, 17 bp, Arabidopsis thaliana
agtgaggtactctgaga

SEQ ID NO: 172656 - DNA, 17 bp, Arabidopsis thaliana
agtgaggtactctgagc

SEQ ID NO: 172657 - DNA, 17 bp, Arabidopsis thaliana
agtgagtagaagcggca

SEQ ID NO: 172658 - DNA, 17 bp, Arabidopsis thaliana
agtgatgacgccattgc

SEQ ID NO: 172659 - DNA, 17 bp, Arabidopsis thaliana
agtgatgtatgcagcta

SEQ ID NO: 172660 - DNA, 17 bp, Arabidopsis thaliana
agtgatgtatgcagctg

SEQ ID NO: 172661 - DNA, 17 bp, Arabidopsis thaliana
agtgattcctcgggcag

SEQ ID NO: 172662 - DNA, 17 bp, Arabidopsis thaliana
agtgattcggtgcgagc

SEQ ID NO: 172663 - DNA, 17 bp, Arabidopsis thaliana
agtgcaacgcataggcg

SEQ ID NO: 172664 - DNA, 17 bp, Arabidopsis thaliana
agtgcaacgcatggtcg

SEQ ID NO: 172665 - DNA, 17 bp, Arabidopsis thaliana
agtgcaacgcttgatcg

SEQ ID NO: 172666 - DNA, 17 bp, Arabidopsis thaliana
agtgcaagaaacaagca

SEQ ID NO: 172667 - DNA, 17 bp, Arabidopsis thaliana
agtgcacgcggtgaggc

SEQ ID NO: 172668 - DNA, 17 bp, Arabidopsis thaliana
agtgccagagctgatcc

SEQ ID NO: 172669 - DNA, 17 bp, Arabidopsis thaliana
agtgccgctcacgcccg

SEQ ID NO: 172670 - DNA, 17 bp, Arabidopsis thaliana
agtgcctaccatggtgg

SEQ ID NO: 172671 - DNA, 17 bp, Arabidopsis thaliana
agtgctagctagtccct

SEQ ID NO: 172672 - DNA, 17 bp, Arabidopsis thaliana
agtgctcattttgttat

SEQ ID NO: 172673 - DNA, 17 bp, Arabidopsis thaliana
agtgctctgaacgtcaa

SEQ ID NO: 172674 - DNA, 17 bp, Arabidopsis thaliana
agtgcttgaaattgtcg

SEQ ID NO: 172675 - DNA, 17 bp, Arabidopsis thaliana
agtgcttgtgttcacga

SEQ ID NO: 172676 - DNA, 17 bp, Arabidopsis thaliana
agtgctttgtgcctatc

SEQ ID NO: 172677 - DNA, 17 bp, Arabidopsis thaliana
agtggaaacatctgctg

SEQ ID NO: 172678 - DNA, 17 bp, Arabidopsis thaliana
agtggaaactatgtata

SEQ ID NO: 172679 - DNA, 17 bp, Arabidopsis thaliana
agtggaaagtgcattcg

SEQ ID NO: 172680 - DNA, 17 bp, Arabidopsis thaliana
agtggacttctcgcgac

SEQ ID NO: 172681 - DNA, 17 bp, Arabidopsis thaliana
agtggatcgtggcagca

SEQ ID NO: 172682 - DNA, 17 bp, Arabidopsis thaliana
agtggatttttttctta

SEQ ID NO: 172683 - DNA, 17 bp, Arabidopsis thaliana
agtggatttttttcttt

SEQ ID NO: 172684 - DNA, 17 bp, Arabidopsis thaliana
agtggcaccgtgggttg

SEQ ID NO: 172685 - DNA, 17 bp, Arabidopsis thaliana
agtggcagagtggcctt

SEQ ID NO: 172686 - DNA, 17 bp, Arabidopsis thaliana
agtggccagcgtaagac

SEQ ID NO: 172687 - DNA, 17 bp, Arabidopsis thaliana
agtggcgcgaagctacc

SEQ ID NO: 172688 - DNA, 17 bp, Arabidopsis thaliana
agtggctagtgatttag

SEQ ID NO: 172689 - DNA, 17 bp, Arabidopsis thaliana
agtggcttatgtggtgg

SEQ ID NO: 172690 - DNA, 17 bp, Arabidopsis thaliana
agtgggaatctcgttaa

SEQ ID NO: 172691 - DNA, 17 bp, Arabidopsis thaliana
agtgggccaccgattat

SEQ ID NO: 172692 - DNA, 17 bp, Arabidopsis thaliana
agtggtaagtattcccg

SEQ ID NO: 172693 - DNA, 17 bp, Arabidopsis thaliana
agtggtaatcattttcc

SEQ ID NO: 172694 - DNA, 17 bp, Arabidopsis thaliana
agtggtcgaggatttgt

SEQ ID NO: 172695 - DNA, 17 bp, Arabidopsis thaliana
agtggtttttggaattt

SEQ ID NO: 172696 - DNA, 17 bp, Arabidopsis thaliana
agtgtcgtctttccact

SEQ ID NO: 172697 - DNA, 17 bp, Arabidopsis thaliana
agtgtctctgttggcaa

SEQ ID NO: 172698 - DNA, 17 bp, Arabidopsis thaliana
agtgtgagcatgcctgt

SEQ ID NO: 172699 - DNA, 17 bp, Arabidopsis thaliana
agtgtggctgatcatcc

SEQ ID NO: 172700 - DNA, 17 bp, Arabidopsis thaliana
agtgtgtgtgtacgata

SEQ ID NO: 172701 - DNA, 17 bp, Arabidopsis thaliana
agtgttcggatcgcggc

SEQ ID NO: 172702 - DNA, 17 bp, Arabidopsis thaliana
agttaactccaatctgt

SEQ ID NO: 172703 - DNA, 17 bp, Arabidopsis thaliana
agttacaacctttttta

SEQ ID NO: 172704 - DNA, 17 bp, Arabidopsis thaliana
agttacaacttttttac

SEQ ID NO: 172705 - DNA, 17 bp, Arabidopsis thaliana
agttacaacttttttta

SEQ ID NO: 172706 - DNA, 17 bp, Arabidopsis thaliana
agttacaatttttttta

SEQ ID NO: 172707 - DNA, 17 bp, Arabidopsis thaliana
agttaccacagggataa

SEQ ID NO: 172708 - DNA, 17 bp, Arabidopsis thaliana
agttaccacgcagttgc

SEQ ID NO: 172709 - DNA, 17 bp, Arabidopsis thaliana
agttaccacgcagttgt

SEQ ID NO: 172710 - DNA, 17 bp, Arabidopsis thaliana
agttaccactgcttttc

SEQ ID NO: 172711 - DNA, 17 bp, Arabidopsis thaliana
agttactaattcattaa

SEQ ID NO: 172712 - DNA, 17 bp, Arabidopsis thaliana
agttactaattcattat

SEQ ID NO: 172713 - DNA, 17 bp, Arabidopsis thaliana
agttagcaggctgaggt

SEQ ID NO: 172714 - DNA, 17 bp, Arabidopsis thaliana
agttataccgcaagatc

SEQ ID NO: 172715 - DNA, 17 bp, Arabidopsis thaliana
agttatagtttgtttga

SEQ ID NO: 172716 - DNA, 17 bp, Arabidopsis thaliana
agttatccctgtggtta

SEQ ID NO: 172717 - DNA, 17 bp, Arabidopsis thaliana
agttcaattctcggaat

SEQ ID NO: 172718 - DNA, 17 bp, Arabidopsis thaliana
agttcacaccttggccg

SEQ ID NO: 172719 - DNA, 17 bp, Arabidopsis thaliana
agttcacgttgatgtgg

SEQ ID NO: 172720 - DNA, 17 bp, Arabidopsis thaliana
agttcactgatcaatga

SEQ ID NO: 172721 - DNA, 17 bp, Arabidopsis thaliana
agttcatatcccacagt

SEQ ID NO: 172722 - DNA, 17 bp, Arabidopsis thaliana
agttcatggcaagccga

SEQ ID NO: 172723 - DNA, 17 bp, Arabidopsis thaliana
agttcatttctcggaat

SEQ ID NO: 172724 - DNA, 17 bp, Arabidopsis thaliana
agttcccctatgataca

SEQ ID NO: 172725 - DNA, 17 bp, Arabidopsis thaliana
agttcgactcgtatttg

SEQ ID NO: 172726 - DNA, 17 bp, Arabidopsis thaliana
agttcgcactgtagatg

SEQ ID NO: 172727 - DNA, 17 bp, Arabidopsis thaliana
agttcgcatcctgtgga

SEQ ID NO: 172728 - DNA, 17 bp, Arabidopsis thaliana
agttcgtccctctctgg

SEQ ID NO: 172729 - DNA, 17 bp, Arabidopsis thaliana
agttcgttcctgggtgc

SEQ ID NO: 172730 - DNA, 17 bp, Arabidopsis thaliana
agttctagccgaggtgt

SEQ ID NO: 172731 - DNA, 17 bp, Arabidopsis thaliana
agttctcacccatcgag

SEQ ID NO: 172732 - DNA, 17 bp, Arabidopsis thaliana
agttctcacccatcgat

SEQ ID NO: 172733 - DNA, 17 bp, Arabidopsis thaliana
agttctctcgtcaatga

SEQ ID NO: 172734 - DNA, 17 bp, Arabidopsis thaliana
agttctctcgtcaatgg

SEQ ID NO: 172735 - DNA, 17 bp, Arabidopsis thaliana
agttgaaccttgggatg

SEQ ID NO: 172736 - DNA, 17 bp, Arabidopsis thaliana
agttgaacggatggttg

SEQ ID NO: 172737 - DNA, 17 bp, Arabidopsis thaliana
agttgaacttgtttcat

SEQ ID NO: 172738 - DNA, 17 bp, Arabidopsis thaliana
agttgaccccgtccagg

SEQ ID NO: 172739 - DNA, 17 bp, Arabidopsis thaliana
agttgactggtccaaag

SEQ ID NO: 172740 - DNA, 17 bp, Arabidopsis thaliana
agttgactgtaccaatt

SEQ ID NO: 172741 - DNA, 17 bp, Arabidopsis thaliana
agttgatctcagatgta

SEQ ID NO: 172742 - DNA, 17 bp, Arabidopsis thaliana
agttgatgatacaagaa

SEQ ID NO: 172743 - DNA, 17 bp, Arabidopsis thaliana
agttgcccaacgtaaaa

SEQ ID NO: 172744 - DNA, 17 bp, Arabidopsis thaliana
agttgcctttgtaatta

SEQ ID NO: 172745 - DNA, 17 bp, Arabidopsis thaliana
agttgctaatacagtta

SEQ ID NO: 172746 - DNA, 17 bp, Arabidopsis thaliana
agttggaagatcgagta

SEQ ID NO: 172747 - DNA, 17 bp, Arabidopsis thaliana
agttggacgtgggttag

SEQ ID NO: 172748 - DNA, 17 bp, Arabidopsis thaliana
agttggagggcaatgcg

SEQ ID NO: 172749 - DNA, 17 bp, Arabidopsis thaliana
agttgggtcaacccata

SEQ ID NO: 172750 - DNA, 17 bp, Arabidopsis thaliana
agttggtggaacactgg

SEQ ID NO: 172751 - DNA, 17 bp, Arabidopsis thaliana
agttggtggagcgattt

SEQ ID NO: 172752 - DNA, 17 bp, Arabidopsis thaliana
agttggttttccctgta

SEQ ID NO: 172753 - DNA, 17 bp, Arabidopsis thaliana
agttgtaaaattcatca

SEQ ID NO: 172754 - DNA, 17 bp, Arabidopsis thaliana
agttgtaaaattcatcc

SEQ ID NO: 172755 - DNA, 17 bp, Arabidopsis thaliana
agttgtaactcttgttg

SEQ ID NO: 172756 - DNA, 17 bp, Arabidopsis thaliana
agttgtaactttgttga

SEQ ID NO: 172757 - DNA, 17 bp, Arabidopsis thaliana
agttgtatttgtgtgaa

SEQ ID NO: 172758 - DNA, 17 bp, Arabidopsis thaliana
agttgtctcttgtagtt

SEQ ID NO: 172759 - DNA, 17 bp, Arabidopsis thaliana
agtttacgtaggaccac

SEQ ID NO: 172760 - DNA, 17 bp, Arabidopsis thaliana
agtttagcctgagacat

SEQ ID NO: 172761 - DNA, 17 bp, Arabidopsis thaliana
agtttagtcttggactg

SEQ ID NO: 172762 - DNA, 17 bp, Arabidopsis thaliana
agtttccctcaggatag

SEQ ID NO: 172763 - DNA, 17 bp, Arabidopsis thaliana
agtttccgtgctatgcc

SEQ ID NO: 172764 - DNA, 17 bp, Arabidopsis thaliana
agtttcctgctgttgcg

SEQ ID NO: 172765 - DNA, 17 bp, Arabidopsis thaliana
agtttcgtcttcggaag

SEQ ID NO: 172766 - DNA, 17 bp, Arabidopsis thaliana
agtttctctccgaggta

SEQ ID NO: 172767 - DNA, 17 bp, Arabidopsis thaliana
agtttctctccgaggtg

SEQ ID NO: 172768 - DNA, 17 bp, Arabidopsis thaliana
agtttgactctagtccg

SEQ ID NO: 172769 - DNA, 17 bp, Arabidopsis thaliana
agtttggctgggacgga

SEQ ID NO: 172770 - DNA, 17 bp, Arabidopsis thaliana
agtttggctggggcggc

SEQ ID NO: 172771 - DNA, 17 bp, Arabidopsis thaliana
agtttggtttgcatctg

SEQ ID NO: 172772 - DNA, 17 bp, Arabidopsis thaliana
agtttgtgggaaaagtt

SEQ ID NO: 172773 - DNA, 17 bp, Arabidopsis thaliana
agtttgttctccatccc

SEQ ID NO: 172774 - DNA, 17 bp, Arabidopsis thaliana
agttttaccctactgat

SEQ ID NO: 172775 - DNA, 17 bp, Arabidopsis thaliana
agttttacgttgggcaa

SEQ ID NO: 172776 - DNA, 17 bp, Arabidopsis thaliana
agttttcaaaccctaaa

SEQ ID NO: 172777 - DNA, 17 bp, Arabidopsis thaliana
agttttcaaccagcaat

SEQ ID NO: 172778 - DNA, 17 bp, Arabidopsis thaliana
agttttcagaccacttg

SEQ ID NO: 172779 - DNA, 17 bp, Arabidopsis thaliana
agttttgaaaagtatcc

SEQ ID NO: 172780 - DNA, 17 bp, Arabidopsis thaliana
agttttgaattaccgag

SEQ ID NO: 172781 - DNA, 17 bp, Arabidopsis thaliana
agttttgacatcataag

SEQ ID NO: 172782 - DNA, 17 bp, Arabidopsis thaliana
agtttttaatattcaag

SEQ ID NO: 172783 - DNA, 17 bp, Arabidopsis thaliana
agttttttcggaccaag

SEQ ID NO: 172784 - DNA, 17 bp, Arabidopsis thaliana
ataaaaaatggatgttg

SEQ ID NO: 172785 - DNA, 17 bp, Arabidopsis thaliana
ataaaaaccgctgattc

SEQ ID NO: 172786 - DNA, 17 bp, Arabidopsis thaliana
ataaaaattcaaataaa

SEQ ID NO: 172787 - DNA, 17 bp, Arabidopsis thaliana
ataaaaattcaaataat

SEQ ID NO: 172788 - DNA, 17 bp, Arabidopsis thaliana
ataaaacaacccacggt

SEQ ID NO: 172789 - DNA, 17 bp, Arabidopsis thaliana
ataaaacaacccgcggt

SEQ ID NO: 172790 - DNA, 17 bp, Arabidopsis thaliana
ataaaacatgtgcaaaa

SEQ ID NO: 172791 - DNA, 17 bp, Arabidopsis thaliana
ataaaagctcccgatca

SEQ ID NO: 172792 - DNA, 17 bp, Arabidopsis thaliana
ataaaaggtcgacgcgg

SEQ ID NO: 172793 - DNA, 17 bp, Arabidopsis thaliana
ataaaagttaactccaa

SEQ ID NO: 172794 - DNA, 17 bp, Arabidopsis thaliana
ataaaatgaacaagcga

SEQ ID NO: 172795 - DNA, 17 bp, Arabidopsis thaliana
ataaaatgaacaagcgg

SEQ ID NO: 172796 - DNA, 17 bp, Arabidopsis thaliana
ataaaccacaaaccaca

SEQ ID NO: 172797 - DNA, 17 bp, Arabidopsis thaliana
ataaacgaatcttagcg

SEQ ID NO: 172798 - DNA, 17 bp, Arabidopsis thaliana
ataaactctcttacgga

SEQ ID NO: 172799 - DNA, 17 bp, Arabidopsis thaliana
ataaactctcttacggg

SEQ ID NO: 172800 - DNA, 17 bp, Arabidopsis thaliana
ataaactgttagggtct

SEQ ID NO: 172801 - DNA, 17 bp, Arabidopsis thaliana
ataaagacattgtttag

SEQ ID NO: 172802 - DNA, 17 bp, Arabidopsis thaliana
ataaagaggaagataga

SEQ ID NO: 172803 - DNA, 17 bp, Arabidopsis thaliana
ataaagcccaaatcacc

SEQ ID NO: 172804 - DNA, 17 bp, Arabidopsis thaliana
ataaaggccttgtaact

SEQ ID NO: 172805 - DNA, 17 bp, Arabidopsis thaliana
ataaaggctaatgttgt

SEQ ID NO: 172806 - DNA, 17 bp, Arabidopsis thaliana
ataaagtaagatgattt

SEQ ID NO: 172807 - DNA, 17 bp, Arabidopsis thaliana
ataaatggtctattcgc

SEQ ID NO: 172808 - DNA, 17 bp, Arabidopsis thaliana
ataaatttctaagatcc

SEQ ID NO: 172809 - DNA, 17 bp, Arabidopsis thaliana
ataacaataccgggctc

SEQ ID NO: 172810 - DNA, 17 bp, Arabidopsis thaliana
ataacaggacgcttgtt

SEQ ID NO: 172811 - DNA, 17 bp, Arabidopsis thaliana
ataacaggtctgtgatg

SEQ ID NO: 172812 - DNA, 17 bp, Arabidopsis thaliana
ataacagttctcaccca

SEQ ID NO: 172813 - DNA, 17 bp, Arabidopsis thaliana
ataacatactggtaaat

SEQ ID NO: 172814 - DNA, 17 bp, Arabidopsis thaliana
ataacatcataggattt

SEQ ID NO: 172815 - DNA, 17 bp, Arabidopsis thaliana
ataacggaggcctagac

SEQ ID NO: 172816 - DNA, 17 bp, Arabidopsis thaliana
ataacggaggcctagga

SEQ ID NO: 172817 - DNA, 17 bp, Arabidopsis thaliana
ataactcgacggatcgc

SEQ ID NO: 172818 - DNA, 17 bp, Arabidopsis thaliana
ataactcgacggatctt

SEQ ID NO: 172819 - DNA, 17 bp, Arabidopsis thaliana
ataactgatgccattgg

SEQ ID NO: 172820 - DNA, 17 bp, Arabidopsis thaliana
ataagatttttcgtgat

SEQ ID NO: 172821 - DNA, 17 bp, Arabidopsis thaliana
ataagcagtgtagcggt

SEQ ID NO: 172822 - DNA, 17 bp, Arabidopsis thaliana
ataaggaatgcttctga

SEQ ID NO: 172823 - DNA, 17 bp, Arabidopsis thaliana
ataaggggaatccgact

SEQ ID NO: 172824 - DNA, 17 bp, Arabidopsis thaliana
ataaggtgccagcggag

SEQ ID NO: 172825 - DNA, 17 bp, Arabidopsis thaliana
ataaggttcgtattgaa

SEQ ID NO: 172826 - DNA, 17 bp, Arabidopsis thaliana
ataaggtttagtggact

SEQ ID NO: 172827 - DNA, 17 bp, Arabidopsis thaliana
ataagtaactgtattag

SEQ ID NO: 172828 - DNA, 17 bp, Arabidopsis thaliana
ataagtatccagggtat

SEQ ID NO: 172829 - DNA, 17 bp, Arabidopsis thaliana
ataagtcagtgagcgac

SEQ ID NO: 172830 - DNA, 17 bp, Arabidopsis thaliana
ataagtgaccatgttgc

SEQ ID NO: 172831 - DNA, 17 bp, Arabidopsis thaliana
ataagtggcaactattc

SEQ ID NO: 172832 - DNA, 17 bp, Arabidopsis thaliana
ataagtgggagcttcgg

SEQ ID NO: 172833 - DNA, 17 bp, Arabidopsis thaliana
ataataggtctgtgatg

SEQ ID NO: 172834 - DNA, 17 bp, Arabidopsis thaliana
ataatcaagtgaataga

SEQ ID NO: 172835 - DNA, 17 bp, Arabidopsis thaliana
ataatcaagtgaatagt

SEQ ID NO: 172836 - DNA, 17 bp, Arabidopsis thaliana
ataatcgaacgagcccg

SEQ ID NO: 172837 - DNA, 17 bp, Arabidopsis thaliana
ataatcttgatgatgca

SEQ ID NO: 172838 - DNA, 17 bp, Arabidopsis thaliana
ataatcttgatgatgct

SEQ ID NO: 172839 - DNA, 17 bp, Arabidopsis thaliana
ataatgcccaaatagtt

SEQ ID NO: 172840 - DNA, 17 bp, Arabidopsis thaliana
ataatggacatagcgag

SEQ ID NO: 172841 - DNA, 17 bp, Arabidopsis thaliana
ataattaccaccgagcg

SEQ ID NO: 172842 - DNA, 17 bp, Arabidopsis thaliana
ataattcgggtcaatta

SEQ ID NO: 172843 - DNA, 17 bp, Arabidopsis thaliana
ataattcgggtcaattc

SEQ ID NO: 172844 - DNA, 17 bp, Arabidopsis thaliana
ataattggaaaacatga

SEQ ID NO: 172845 - DNA, 17 bp, Arabidopsis thaliana
ataatttcctaagatcc

SEQ ID NO: 172846 - DNA, 17 bp, Arabidopsis thaliana
ataattttctaagatcc

SEQ ID NO: 172847 - DNA, 17 bp, Arabidopsis thaliana
atacaaaccatgaaaga

SEQ ID NO: 172848 - DNA, 17 bp, Arabidopsis thaliana
atacaaaccatgaaagt

SEQ ID NO: 172849 - DNA, 17 bp, Arabidopsis thaliana
atacaaccacgagatcc

SEQ ID NO: 172850 - DNA, 17 bp, Arabidopsis thaliana
atacaacccaatcgctc

SEQ ID NO: 172851 - DNA, 17 bp, Arabidopsis thaliana
atacacaccgatgctga

SEQ ID NO: 172852 - DNA, 17 bp, Arabidopsis thaliana
atacacactgatgctga

SEQ ID NO: 172853 - DNA, 17 bp, Arabidopsis thaliana
atacactctgatggtga

SEQ ID NO: 172854 - DNA, 17 bp, Arabidopsis thaliana
atacactctgatggtgc

SEQ ID NO: 172855 - DNA, 17 bp, Arabidopsis thaliana
atacactgatgctgaca

SEQ ID NO: 172856 - DNA, 17 bp, Arabidopsis thaliana
atacagctgagcagcat

SEQ ID NO: 172857 - DNA, 17 bp, Arabidopsis thaliana
atacagtctttattagt

SEQ ID NO: 172858 - DNA, 17 bp, Arabidopsis thaliana
atacatacacctaatca

SEQ ID NO: 172859 - DNA, 17 bp, Arabidopsis thaliana
atacatacacctaatcc

SEQ ID NO: 172860 - DNA, 17 bp, Arabidopsis thaliana
atacatatcttaagtgt

SEQ ID NO: 172861 - DNA, 17 bp, Arabidopsis thaliana
ataccagcactaatgca

SEQ ID NO: 172862 - DNA, 17 bp, Arabidopsis thaliana
ataccatgtctcatcag

SEQ ID NO: 172863 - DNA, 17 bp, Arabidopsis thaliana
ataccctggatacttat

SEQ ID NO: 172864 - DNA, 17 bp, Arabidopsis thaliana
ataccgtcctatactga

SEQ ID NO: 172865 - DNA, 17 bp, Arabidopsis thaliana
atacctactaccggcca

SEQ ID NO: 172866 - DNA, 17 bp, Arabidopsis thaliana
atacctatgcgggatca

SEQ ID NO: 172867 - DNA, 17 bp, Arabidopsis thaliana
atacctttctcggcctt

SEQ ID NO: 172868 - DNA, 17 bp, Arabidopsis thaliana
atacgaaccgtgaaagc

SEQ ID NO: 172869 - DNA, 17 bp, Arabidopsis thaliana
atacgaattaggtaaat

SEQ ID NO: 172870 - DNA, 17 bp, Arabidopsis thaliana
atacgaccatacccaca

SEQ ID NO: 172871 - DNA, 17 bp, Arabidopsis thaliana
atacgaccatacccact

SEQ ID NO: 172872 - DNA, 17 bp, Arabidopsis thaliana
atacgagatattggtgc

SEQ ID NO: 172873 - DNA, 17 bp, Arabidopsis thaliana
atacgatcaacctctgg

SEQ ID NO: 172874 - DNA, 17 bp, Arabidopsis thaliana
atacgcgaaaccacgga

SEQ ID NO: 172875 - DNA, 17 bp, Arabidopsis thaliana
atacgctatgttgaact

SEQ ID NO: 172876 - DNA, 17 bp, Arabidopsis thaliana
atacgctatgttggact

SEQ ID NO: 172877 - DNA, 17 bp, Arabidopsis thaliana
atacgctcctggtctta

SEQ ID NO: 172878 - DNA, 17 bp, Arabidopsis thaliana
atacgggcgagagaccg

SEQ ID NO: 172879 - DNA, 17 bp, Arabidopsis thaliana
atacggttagctaacga

SEQ ID NO: 172880 - DNA, 17 bp, Arabidopsis thaliana
atactaaatctggatca

SEQ ID NO: 172881 - DNA, 17 bp, Arabidopsis thaliana
atactaatgtttgggag

SEQ ID NO: 172882 - DNA, 17 bp, Arabidopsis thaliana
atactcaaccgccgaca

SEQ ID NO: 172883 - DNA, 17 bp, Arabidopsis thaliana
atactcattttcgacgg

SEQ ID NO: 172884 - DNA, 17 bp, Arabidopsis thaliana
atactccattttgcggt

SEQ ID NO: 172885 - DNA, 17 bp, Arabidopsis thaliana
atactccgccccgtcgc

SEQ ID NO: 172886 - DNA, 17 bp, Arabidopsis thaliana
atactcgaccctctcat

SEQ ID NO: 172887 - DNA, 17 bp, Arabidopsis thaliana
atactgaccagcaaata

SEQ ID NO: 172888 - DNA, 17 bp, Arabidopsis thaliana
atactgattttggtttt

SEQ ID NO: 172889 - DNA, 17 bp, Arabidopsis thaliana
atactggcttctaccgc

SEQ ID NO: 172890 - DNA, 17 bp, Arabidopsis thaliana
atactggtaaatggatg

SEQ ID NO: 172891 - DNA, 17 bp, Arabidopsis thaliana
atactggtaaatgggat

SEQ ID NO: 172892 - DNA, 17 bp, Arabidopsis thaliana
atacttggtgtgaatta

SEQ ID NO: 172893 - DNA, 17 bp, Arabidopsis thaliana
atacttggtgtgaattg

SEQ ID NO: 172894 - DNA, 17 bp, Arabidopsis thaliana
atacttggtgtgagtta

SEQ ID NO: 172895 - DNA, 17 bp, Arabidopsis thaliana
atacttggtgtgagttg

SEQ ID NO: 172896 - DNA, 17 bp, Arabidopsis thaliana
atactttgagagatcaa

SEQ ID NO: 172897 - DNA, 17 bp, Arabidopsis thaliana
atactttgttactggag

SEQ ID NO: 172898 - DNA, 17 bp, Arabidopsis thaliana
atacttttcaaaactgg

SEQ ID NO: 172899 - DNA, 17 bp, Arabidopsis thaliana
atactttttttttcttt

SEQ ID NO: 172900 - DNA, 17 bp, Arabidopsis thaliana
atagaaacgctctccag

SEQ ID NO: 172901 - DNA, 17 bp, Arabidopsis thaliana
atagaaactgaatgccc

SEQ ID NO: 172902 - DNA, 17 bp, Arabidopsis thaliana
atagaaatggcgatgca

SEQ ID NO: 172903 - DNA, 17 bp, Arabidopsis thaliana
atagacgacggcaggtc

SEQ ID NO: 172904 - DNA, 17 bp, Arabidopsis thaliana
atagagaaatcgtagta

SEQ ID NO: 172905 - DNA, 17 bp, Arabidopsis thaliana
atagagaaatcgtagtt

SEQ ID NO: 172906 - DNA, 17 bp, Arabidopsis thaliana
atagagaacctgagatc

SEQ ID NO: 172907 - DNA, 17 bp, Arabidopsis thaliana
atagagacagacaacga

SEQ ID NO: 172908 - DNA, 17 bp, Arabidopsis thaliana
atagagacagacaacgg

SEQ ID NO: 172909 - DNA, 17 bp, Arabidopsis thaliana
atagatagtctaagtca

SEQ ID NO: 172910 - DNA, 17 bp, Arabidopsis thaliana
atagatcattccaattg

SEQ ID NO: 172911 - DNA, 17 bp, Arabidopsis thaliana
atagatcattgcaattg

SEQ ID NO: 172912 - DNA, 17 bp, Arabidopsis thaliana
atagattttttgagaca

SEQ ID NO: 172913 - DNA, 17 bp, Arabidopsis thaliana
atagcaaactccttaca

SEQ ID NO: 172914 - DNA, 17 bp, Arabidopsis thaliana
atagcaaatcgataagc

SEQ ID NO: 172915 - DNA, 17 bp, Arabidopsis thaliana
atagccaaggatgactt

SEQ ID NO: 172916 - DNA, 17 bp, Arabidopsis thaliana
atagcctattgttggac

SEQ ID NO: 172917 - DNA, 17 bp, Arabidopsis thaliana
atagccttgaacgccgt

SEQ ID NO: 172918 - DNA, 17 bp, Arabidopsis thaliana
atagcgtttgattgatt

SEQ ID NO: 172919 - DNA, 17 bp, Arabidopsis thaliana
ataggacgcataacata

SEQ ID NO: 172920 - DNA, 17 bp, Arabidopsis thaliana
ataggactccgctcgca

SEQ ID NO: 172921 - DNA, 17 bp, Arabidopsis thaliana
ataggagtggcaccgtg

SEQ ID NO: 172922 - DNA, 17 bp, Arabidopsis thaliana
ataggcagaacccaaaa

SEQ ID NO: 172923 - DNA, 17 bp, Arabidopsis thaliana
ataggcagaacccaaat

SEQ ID NO: 172924 - DNA, 17 bp, Arabidopsis thaliana
atagggacagaattttc

SEQ ID NO: 172925 - DNA, 17 bp, Arabidopsis thaliana
ataggggcgaaagacta

SEQ ID NO: 172926 - DNA, 17 bp, Arabidopsis thaliana
ataggggtttatagacc

SEQ ID NO: 172927 - DNA, 17 bp, Arabidopsis thaliana
ataggggtttgtagacc

SEQ ID NO: 172928 - DNA, 17 bp, Arabidopsis thaliana
atagggtcgttaagcgg

SEQ ID NO: 172929 - DNA, 17 bp, Arabidopsis thaliana
ataggtaggacgtgtcg

SEQ ID NO: 172930 - DNA, 17 bp, Arabidopsis thaliana
ataggtattcgagtatt

SEQ ID NO: 172931 - DNA, 17 bp, Arabidopsis thaliana
atagtatgccgctgaag

SEQ ID NO: 172932 - DNA, 17 bp, Arabidopsis thaliana
atagtccacaaaagtgg

SEQ ID NO: 172933 - DNA, 17 bp, Arabidopsis thaliana
atagtcgcatcctgtag

SEQ ID NO: 172934 - DNA, 17 bp, Arabidopsis thaliana
atagtctctgcaaatat

SEQ ID NO: 172935 - DNA, 17 bp, Arabidopsis thaliana
atagtggcctaccatgg

SEQ ID NO: 172936 - DNA, 17 bp, Arabidopsis thaliana
atagttactcccgccgt

SEQ ID NO: 172937 - DNA, 17 bp, Arabidopsis thaliana
atagttatccgtaatta

SEQ ID NO: 172938 - DNA, 17 bp, Arabidopsis thaliana
atagttttgtttctact

SEQ ID NO: 172939 - DNA, 17 bp, Arabidopsis thaliana
atataagtgaccatgtt

SEQ ID NO: 172940 - DNA, 17 bp, Arabidopsis thaliana
atatagcctattgttga

SEQ ID NO: 172941 - DNA, 17 bp, Arabidopsis thaliana
atatagcctattgttgg

SEQ ID NO: 172942 - DNA, 17 bp, Arabidopsis thaliana
atatagcctattgttta

SEQ ID NO: 172943 - DNA, 17 bp, Arabidopsis thaliana
atatcattccggatatc

SEQ ID NO: 172944 - DNA, 17 bp, Arabidopsis thaliana
atatcccatttccacca

SEQ ID NO: 172945 - DNA, 17 bp, Arabidopsis thaliana
atatcccatttctacca

SEQ ID NO: 172946 - DNA, 17 bp, Arabidopsis thaliana
atatccccggggaacca

SEQ ID NO: 172947 - DNA, 17 bp, Arabidopsis thaliana
atatcgacgaactagaa

SEQ ID NO: 172948 - DNA, 17 bp, Arabidopsis thaliana
atatcgcacaataggac

SEQ ID NO: 172949 - DNA, 17 bp, Arabidopsis thaliana
atatcgtagttttacgt

SEQ ID NO: 172950 - DNA, 17 bp, Arabidopsis thaliana
atatctaactagatgaa

SEQ ID NO: 172951 - DNA, 17 bp, Arabidopsis thaliana
atatcttaagtgtcgtc

SEQ ID NO: 172952 - DNA, 17 bp, Arabidopsis thaliana
atatgaggtgctttgaa

SEQ ID NO: 172953 - DNA, 17 bp, Arabidopsis thaliana
atatgccgataacagga

SEQ ID NO: 172954 - DNA, 17 bp, Arabidopsis thaliana
atatgctatgttggact

SEQ ID NO: 172955 - DNA, 17 bp, Arabidopsis thaliana
atatgggattaaagacc

SEQ ID NO: 172956 - DNA, 17 bp, Arabidopsis thaliana
atatggtgccttgctag

SEQ ID NO: 172957 - DNA, 17 bp, Arabidopsis thaliana
atatgtccaatgtcttt

SEQ ID NO: 172958 - DNA, 17 bp, Arabidopsis thaliana
atatgtgatccgaatta

SEQ ID NO: 172959 - DNA, 17 bp, Arabidopsis thaliana
atatgtttactaaaaca

SEQ ID NO: 172960 - DNA, 17 bp, Arabidopsis thaliana
atatgtttcagtcttat

SEQ ID NO: 172961 - DNA, 17 bp, Arabidopsis thaliana
atatgtttctgtagcta

SEQ ID NO: 172962 - DNA, 17 bp, Arabidopsis thaliana
atattacgggtgaaata

SEQ ID NO: 172963 - DNA, 17 bp, Arabidopsis thaliana
atattacgggtgaaatc

SEQ ID NO: 172964 - DNA, 17 bp, Arabidopsis thaliana
atattatgatggtagtc

SEQ ID NO: 172965 - DNA, 17 bp, Arabidopsis thaliana
atattcaaggacagata

SEQ ID NO: 172966 - DNA, 17 bp, Arabidopsis thaliana
atattccaggatatgca

SEQ ID NO: 172967 - DNA, 17 bp, Arabidopsis thaliana
atattcgaggatatgca

SEQ ID NO: 172968 - DNA, 17 bp, Arabidopsis thaliana
atattctaggatatgca

SEQ ID NO: 172969 - DNA, 17 bp, Arabidopsis thaliana
atattgatgtgcggcca

SEQ ID NO: 172970 - DNA, 17 bp, Arabidopsis thaliana
atattgatttggctttg

SEQ ID NO: 172971 - DNA, 17 bp, Arabidopsis thaliana
atattgatttggctttt

SEQ ID NO: 172972 - DNA, 17 bp, Arabidopsis thaliana
atattggcctttaccgc

SEQ ID NO: 172973 - DNA, 17 bp, Arabidopsis thaliana
atattggcttctaccga

SEQ ID NO: 172974 - DNA, 17 bp, Arabidopsis thaliana
atattggcttctaccgc

SEQ ID NO: 172975 - DNA, 17 bp, Arabidopsis thaliana
atattgttgtgaccaac

SEQ ID NO: 172976 - DNA, 17 bp, Arabidopsis thaliana
atatttaagcatgactt

SEQ ID NO: 172977 - DNA, 17 bp, Arabidopsis thaliana
atatttgcacaggtgag

SEQ ID NO: 172978 - DNA, 17 bp, Arabidopsis thaliana
atatttggtttgttcaa

SEQ ID NO: 172979 - DNA, 17 bp, Arabidopsis thaliana
atatttgttttaggaaa

SEQ ID NO: 172980 - DNA, 17 bp, Arabidopsis thaliana
atcaaaaaatgggagat

SEQ ID NO: 172981 - DNA, 17 bp, Arabidopsis thaliana
atcaaaacagatgcagc

SEQ ID NO: 172982 - DNA, 17 bp, Arabidopsis thaliana
atcaaaacagatgctgc

SEQ ID NO: 172983 - DNA, 17 bp, Arabidopsis thaliana
atcaaaagattcttact

SEQ ID NO: 172984 - DNA, 17 bp, Arabidopsis thaliana
atcaaaaggccgtgggg

SEQ ID NO: 172985 - DNA, 17 bp, Arabidopsis thaliana
atcaaaaggtctataga

SEQ ID NO: 172986 - DNA, 17 bp, Arabidopsis thaliana
atcaaacgctatgttag

SEQ ID NO: 172987 - DNA, 17 bp, Arabidopsis thaliana
atcaaagatggattcgg

SEQ ID NO: 172988 - DNA, 17 bp, Arabidopsis thaliana
atcaaattgtgttacta

SEQ ID NO: 172989 - DNA, 17 bp, Arabidopsis thaliana
atcaaattgtgttactt

SEQ ID NO: 172990 - DNA, 17 bp, Arabidopsis thaliana
atcaaccaggtaccgcg

SEQ ID NO: 172991 - DNA, 17 bp, Arabidopsis thaliana
atcaacgagattcccac

SEQ ID NO: 172992 - DNA, 17 bp, Arabidopsis thaliana
atcaactagccccgaaa

SEQ ID NO: 172993 - DNA, 17 bp, Arabidopsis thaliana
atcaactttcgatgata

SEQ ID NO: 172994 - DNA, 17 bp, Arabidopsis thaliana
atcaactttcgatggta

SEQ ID NO: 172995 - DNA, 17 bp, Arabidopsis thaliana
atcaagaacgaaagtta

SEQ ID NO: 172996 - DNA, 17 bp, Arabidopsis thaliana
atcaagattctgatcca

SEQ ID NO: 172997 - DNA, 17 bp, Arabidopsis thaliana
atcaagattctgtccat

SEQ ID NO: 172998 - DNA, 17 bp, Arabidopsis thaliana
atcaagattttgttgta

SEQ ID NO: 172999 - DNA, 17 bp, Arabidopsis thaliana
atcaagccacacgtagt

SEQ ID NO: 173000 - DNA, 17 bp, Arabidopsis thaliana
atcaaggctgaggcgtg

SEQ ID NO: 173001 - DNA, 17 bp, Arabidopsis thaliana
atcaagttctaagctct

SEQ ID NO: 173002 - DNA, 17 bp, Arabidopsis thaliana
atcaatctccatgtgtt

SEQ ID NO: 173003 - DNA, 17 bp, Arabidopsis thaliana
atcaatgggttttgcaa

SEQ ID NO: 173004 - DNA, 17 bp, Arabidopsis thaliana
atcacaccgatgctgac

SEQ ID NO: 173005 - DNA, 17 bp, Arabidopsis thaliana
atcacactgatgctgac

SEQ ID NO: 173006 - DNA, 17 bp, Arabidopsis thaliana
atcacactgatgcttac

SEQ ID NO: 173007 - DNA, 17 bp, Arabidopsis thaliana
atcaccaaaagtctatt

SEQ ID NO: 173008 - DNA, 17 bp, Arabidopsis thaliana
atcaccagatcttttgt

SEQ ID NO: 173009 - DNA, 17 bp, Arabidopsis thaliana
atcacgaatttggaata

SEQ ID NO: 173010 - DNA, 17 bp, Arabidopsis thaliana
atcacgcgatctctttg

SEQ ID NO: 173011 - DNA, 17 bp, Arabidopsis thaliana
atcacgtctgcctgggt

SEQ ID NO: 173012 - DNA, 17 bp, Arabidopsis thaliana
atcacttgcaaagacaa

SEQ ID NO: 173013 - DNA, 17 bp, Arabidopsis thaliana
atcactttgtttaccag

SEQ ID NO: 173014 - DNA, 17 bp, Arabidopsis thaliana
atcagaactccgcagca

SEQ ID NO: 173015 - DNA, 17 bp, Arabidopsis thaliana
atcagaatcttgatgaa

SEQ ID NO: 173016 - DNA, 17 bp, Arabidopsis thaliana
atcagaatcttgatgat

SEQ ID NO: 173017 - DNA, 17 bp, Arabidopsis thaliana
atcagacaaaaaaattt

SEQ ID NO: 173018 - DNA, 17 bp, Arabidopsis thaliana
atcagaggctgcaacga

SEQ ID NO: 173019 - DNA, 17 bp, Arabidopsis thaliana
atcagagtgcgcagcgg

SEQ ID NO: 173020 - DNA, 17 bp, Arabidopsis thaliana
atcagagtggcgcacgc

SEQ ID NO: 173021 - DNA, 17 bp, Arabidopsis thaliana
atcagagtggcgcagcg

SEQ ID NO: 173022 - DNA, 17 bp, Arabidopsis thaliana
atcagagtgtatctaaa

SEQ ID NO: 173023 - DNA, 17 bp, Arabidopsis thaliana
atcagagttgcgcagcg

SEQ ID NO: 173024 - DNA, 17 bp, Arabidopsis thaliana
atcagatttggctaggg

SEQ ID NO: 173025 - DNA, 17 bp, Arabidopsis thaliana
atcagcaaaggatggtg

SEQ ID NO: 173026 - DNA, 17 bp, Arabidopsis thaliana
atcagcaaccgcaggag

SEQ ID NO: 173027 - DNA, 17 bp, Arabidopsis thaliana
atcagccaggttgttcc

SEQ ID NO: 173028 - DNA, 17 bp, Arabidopsis thaliana
atcagcctctattgact

SEQ ID NO: 173029 - DNA, 17 bp, Arabidopsis thaliana
atcagcggatgttgctt

SEQ ID NO: 173030 - DNA, 17 bp, Arabidopsis thaliana
atcagcggctaacaact

SEQ ID NO: 173031 - DNA, 17 bp, Arabidopsis thaliana
atcagctcgcgttgact

SEQ ID NO: 173032 - DNA, 17 bp, Arabidopsis thaliana
atcaggacatgttttgc

SEQ ID NO: 173033 - DNA, 17 bp, Arabidopsis thaliana
atcaggagaagccgcgt

SEQ ID NO: 173034 - DNA, 17 bp, Arabidopsis thaliana
atcaggagtcctgttgt

SEQ ID NO: 173035 - DNA, 17 bp, Arabidopsis thaliana
atcagggtcgagtccga

SEQ ID NO: 173036 - DNA, 17 bp, Arabidopsis thaliana
atcaggtctcatctgca

SEQ ID NO: 173037 - DNA, 17 bp, Arabidopsis thaliana
atcagtaaccgtagcgc

SEQ ID NO: 173038 - DNA, 17 bp, Arabidopsis thaliana
atcagtagatcagagcg

SEQ ID NO: 173039 - DNA, 17 bp, Arabidopsis thaliana
atcagtgagacgctata

SEQ ID NO: 173040 - DNA, 17 bp, Arabidopsis thaliana
atcagttgatgagcaaa

SEQ ID NO: 173041 - DNA, 17 bp, Arabidopsis thaliana
atcataccttgtagcac

SEQ ID NO: 173042 - DNA, 17 bp, Arabidopsis thaliana
atcatacgatctctttg

SEQ ID NO: 173043 - DNA, 17 bp, Arabidopsis thaliana
atcatactgaccagcaa

SEQ ID NO: 173044 - DNA, 17 bp, Arabidopsis thaliana
atcatagggaagtcttg

SEQ ID NO: 173045 - DNA, 17 bp, Arabidopsis thaliana
atcatatcagtggtttt

SEQ ID NO: 173046 - DNA, 17 bp, Arabidopsis thaliana
atcatcaacaggtgagt

SEQ ID NO: 173047 - DNA, 17 bp, Arabidopsis thaliana
atcatcaagattctgat

SEQ ID NO: 173048 - DNA, 17 bp, Arabidopsis thaliana
atcatcagggtttggat

SEQ ID NO: 173049 - DNA, 17 bp, Arabidopsis thaliana
atcatcccccgtgtttt

SEQ ID NO: 173050 - DNA, 17 bp, Arabidopsis thaliana
atcatccttctggtttt

SEQ ID NO: 173051 - DNA, 17 bp, Arabidopsis thaliana
atcatgccgatacgcga

SEQ ID NO: 173052 - DNA, 17 bp, Arabidopsis thaliana
atcattcgcttggagac

SEQ ID NO: 173053 - DNA, 17 bp, Arabidopsis thaliana
atcattcgcttggatat

SEQ ID NO: 173054 - DNA, 17 bp, Arabidopsis thaliana
atcattcgcttggatgg

SEQ ID NO: 173055 - DNA, 17 bp, Arabidopsis thaliana
atcattgatgctctttg

SEQ ID NO: 173056 - DNA, 17 bp, Arabidopsis thaliana
atcattgcaattgttgg

SEQ ID NO: 173057 - DNA, 17 bp, Arabidopsis thaliana
atcattgtcgatacctg

SEQ ID NO: 173058 - DNA, 17 bp, Arabidopsis thaliana
atcattgtgaagcagaa

SEQ ID NO: 173059 - DNA, 17 bp, Arabidopsis thaliana
atcattgttgctctaag

SEQ ID NO: 173060 - DNA, 17 bp, Arabidopsis thaliana
atcattttgagagtaat

SEQ ID NO: 173061 - DNA, 17 bp, Arabidopsis thaliana
atccaaaggtctataga

SEQ ID NO: 173062 - DNA, 17 bp, Arabidopsis thaliana
atccaacgtttactata

SEQ ID NO: 173063 - DNA, 17 bp, Arabidopsis thaliana
atccaacgtttactatg

SEQ ID NO: 173064 - DNA, 17 bp, Arabidopsis thaliana
atccaagacataattaa

SEQ ID NO: 173065 - DNA, 17 bp, Arabidopsis thaliana
atccaaggaaggcagca

SEQ ID NO: 173066 - DNA, 17 bp, Arabidopsis thaliana
atccaatgccccgaaaa

SEQ ID NO: 173067 - DNA, 17 bp, Arabidopsis thaliana
atccaattcacaagaga

SEQ ID NO: 173068 - DNA, 17 bp, Arabidopsis thaliana
atccacactgatgctga

SEQ ID NO: 173069 - DNA, 17 bp, Arabidopsis thaliana
atccactgagattcaga

SEQ ID NO: 173070 - DNA, 17 bp, Arabidopsis thaliana
atccactgagattcagc

SEQ ID NO: 173071 - DNA, 17 bp, Arabidopsis thaliana
atccactgagtgtgact

SEQ ID NO: 173072 - DNA, 17 bp, Arabidopsis thaliana
atccactgatgctgaca

SEQ ID NO: 173073 - DNA, 17 bp, Arabidopsis thaliana
atccagaaacaggttca

SEQ ID NO: 173074 - DNA, 17 bp, Arabidopsis thaliana
atccagcgaaaccacag

SEQ ID NO: 173075 - DNA, 17 bp, Arabidopsis thaliana
atccatcctgagttcca

SEQ ID NO: 173076 - DNA, 17 bp, Arabidopsis thaliana
atccatgcgtcgcttct

SEQ ID NO: 173077 - DNA, 17 bp, Arabidopsis thaliana
atccattgagattcggc

SEQ ID NO: 173078 - DNA, 17 bp, Arabidopsis thaliana
atccattggtataacta

SEQ ID NO: 173079 - DNA, 17 bp, Arabidopsis thaliana
atcccatataggtatta

SEQ ID NO: 173080 - DNA, 17 bp, Arabidopsis thaliana
atcccatttaccagtat

SEQ ID NO: 173081 - DNA, 17 bp, Arabidopsis thaliana
atccccaaaatcaacca

SEQ ID NO: 173082 - DNA, 17 bp, Arabidopsis thaliana
atccccatggaaacaga

SEQ ID NO: 173083 - DNA, 17 bp, Arabidopsis thaliana
atccccatggaaacagg

SEQ ID NO: 173084 - DNA, 17 bp, Arabidopsis thaliana
atcccgccgctgagatg

SEQ ID NO: 173085 - DNA, 17 bp, Arabidopsis thaliana
atcccgccttgcatcaa

SEQ ID NO: 173086 - DNA, 17 bp, Arabidopsis thaliana
atcccgccttgcatgca

SEQ ID NO: 173087 - DNA, 17 bp, Arabidopsis thaliana
atcccgtcgctgtcatc

SEQ ID NO: 173088 - DNA, 17 bp, Arabidopsis thaliana
atccctcccaaaaccct

SEQ ID NO: 173089 - DNA, 17 bp, Arabidopsis thaliana
atccctgccctttgtac

SEQ ID NO: 173090 - DNA, 17 bp, Arabidopsis thaliana
atcccttacaatgtcga

SEQ ID NO: 173091 - DNA, 17 bp, Arabidopsis thaliana
atcccttccacttcttc

SEQ ID NO: 173092 - DNA, 17 bp, Arabidopsis thaliana
atcccttctcatcgatg

SEQ ID NO: 173093 - DNA, 17 bp, Arabidopsis thaliana
atcccttggcattagtc

SEQ ID NO: 173094 - DNA, 17 bp, Arabidopsis thaliana
atccctttgcttttcca

SEQ ID NO: 173095 - DNA, 17 bp, Arabidopsis thaliana
atccgaccaggacgcat

SEQ ID NO: 173096 - DNA, 17 bp, Arabidopsis thaliana
atccgagccaaagccgt

SEQ ID NO: 173097 - DNA, 17 bp, Arabidopsis thaliana
atccgatcaacaagagt

SEQ ID NO: 173098 - DNA, 17 bp, Arabidopsis thaliana
atccgcaacgcaaggtt

SEQ ID NO: 173099 - DNA, 17 bp, Arabidopsis thaliana
atccgcagggaccatcg

SEQ ID NO: 173100 - DNA, 17 bp, Arabidopsis thaliana
atccgcatcctgtagat

SEQ ID NO: 173101 - DNA, 17 bp, Arabidopsis thaliana
atccgcatttgcgcatc

SEQ ID NO: 173102 - DNA, 17 bp, Arabidopsis thaliana
atccgctaaggagtgtg

SEQ ID NO: 173103 - DNA, 17 bp, Arabidopsis thaliana
atccggaggaccgagtg

SEQ ID NO: 173104 - DNA, 17 bp, Arabidopsis thaliana
atccggcggaccaggtt

SEQ ID NO: 173105 - DNA, 17 bp, Arabidopsis thaliana
atccgggcggaggacaa

SEQ ID NO: 173106 - DNA, 17 bp, Arabidopsis thaliana
atccggtccgccgatcg

SEQ ID NO: 173107 - DNA, 17 bp, Arabidopsis thaliana
atccgtaattagtgaga

SEQ ID NO: 173108 - DNA, 17 bp, Arabidopsis thaliana
atccgtcaagatcgtta

SEQ ID NO: 173109 - DNA, 17 bp, Arabidopsis thaliana
atccgtccactgctgag

SEQ ID NO: 173110 - DNA, 17 bp, Arabidopsis thaliana
atccgtccttcgggcga

SEQ ID NO: 173111 - DNA, 17 bp, Arabidopsis thaliana
atccgtccttcgggcgg

SEQ ID NO: 173112 - DNA, 17 bp, Arabidopsis thaliana
atccgtcgcctcgcccg

SEQ ID NO: 173113 - DNA, 17 bp, Arabidopsis thaliana
atccgtgtgctacaagg

SEQ ID NO: 173114 - DNA, 17 bp, Arabidopsis thaliana
atcctacagagcgtgcc

SEQ ID NO: 173115 - DNA, 17 bp, Arabidopsis thaliana
atcctattgtgttggcc

SEQ ID NO: 173116 - DNA, 17 bp, Arabidopsis thaliana
atcctcaggagccgcct

SEQ ID NO: 173117 - DNA, 17 bp, Arabidopsis thaliana
atcctcaggagccgctt

SEQ ID NO: 173118 - DNA, 17 bp, Arabidopsis thaliana
atcctccaccaccaccg

SEQ ID NO: 173119 - DNA, 17 bp, Arabidopsis thaliana
atcctcgggatacagtt

SEQ ID NO: 173120 - DNA, 17 bp, Arabidopsis thaliana
atcctgacatgttcaag

SEQ ID NO: 173121 - DNA, 17 bp, Arabidopsis thaliana
atcctgatgttgtaact

SEQ ID NO: 173122 - DNA, 17 bp, Arabidopsis thaliana
atcctgccgactgtacg

SEQ ID NO: 173123 - DNA, 17 bp, Arabidopsis thaliana
atcctgcggaaggatca

SEQ ID NO: 173124 - DNA, 17 bp, Arabidopsis thaliana
atcctggcatgtttctg

SEQ ID NO: 173125 - DNA, 17 bp, Arabidopsis thaliana
atcctgggcctactaat

SEQ ID NO: 173126 - DNA, 17 bp, Arabidopsis thaliana
atcctgtagatggatca

SEQ ID NO: 173127 - DNA, 17 bp, Arabidopsis thaliana
atcctgtagatggatcg

SEQ ID NO: 173128 - DNA, 17 bp, Arabidopsis thaliana
atccttacaatctcaag

SEQ ID NO: 173129 - DNA, 17 bp, Arabidopsis thaliana
atccttagtcgcatcct

SEQ ID NO: 173130 - DNA, 17 bp, Arabidopsis thaliana
atccttcaactggcgat

SEQ ID NO: 173131 - DNA, 17 bp, Arabidopsis thaliana
atccttccaccgtcaag

SEQ ID NO: 173132 - DNA, 17 bp, Arabidopsis thaliana
atccttcgatgtcgact

SEQ ID NO: 173133 - DNA, 17 bp, Arabidopsis thaliana
atccttcgatgtcggct

SEQ ID NO: 173134 - DNA, 17 bp, Arabidopsis thaliana
atccttctggtttttgc

SEQ ID NO: 173135 - DNA, 17 bp, Arabidopsis thaliana
atccttgaatatgttca

SEQ ID NO: 173136 - DNA, 17 bp, Arabidopsis thaliana
atccttgcgcaggagcc

SEQ ID NO: 173137 - DNA, 17 bp, Arabidopsis thaliana
atccttgcgcaggggcc

SEQ ID NO: 173138 - DNA, 17 bp, Arabidopsis thaliana
atccttggctagatcca

SEQ ID NO: 173139 - DNA, 17 bp, Arabidopsis thaliana
atccttggctcagatcc

SEQ ID NO: 173140 - DNA, 17 bp, Arabidopsis thaliana
atcgaaaatctagatta

SEQ ID NO: 173141 - DNA, 17 bp, Arabidopsis thaliana
atcgaaacctggctctg

SEQ ID NO: 173142 - DNA, 17 bp, Arabidopsis thaliana
atcgaacgctatgttgg

SEQ ID NO: 173143 - DNA, 17 bp, Arabidopsis thaliana
atcgaatcgggttgcaa

SEQ ID NO: 173144 - DNA, 17 bp, Arabidopsis thaliana
atcgacaccttgcggca

SEQ ID NO: 173145 - DNA, 17 bp, Arabidopsis thaliana
atcgacaccttgcggct

SEQ ID NO: 173146 - DNA, 17 bp, Arabidopsis thaliana
atcgacagagaaacaga

SEQ ID NO: 173147 - DNA, 17 bp, Arabidopsis thaliana
atcgacgcggattacgg

SEQ ID NO: 173148 - DNA, 17 bp, Arabidopsis thaliana
atcgagaggggcctgtg

SEQ ID NO: 173149 - DNA, 17 bp, Arabidopsis thaliana
atcgagcaatgggctga

SEQ ID NO: 173150 - DNA, 17 bp, Arabidopsis thaliana
atcgagcaatgggctgc

SEQ ID NO: 173151 - DNA, 17 bp, Arabidopsis thaliana
atcgagtctttgaacgc

SEQ ID NO: 173152 - DNA, 17 bp, Arabidopsis thaliana
atcgagttcttgatgag

SEQ ID NO: 173153 - DNA, 17 bp, Arabidopsis thaliana
atcgataaacctctgca

SEQ ID NO: 173154 - DNA, 17 bp, Arabidopsis thaliana
atcgataccccgcatct

SEQ ID NO: 173155 - DNA, 17 bp, Arabidopsis thaliana
atcgatattcgattttt

SEQ ID NO: 173156 - DNA, 17 bp, Arabidopsis thaliana
atcgatcacggcaatcc

SEQ ID NO: 173157 - DNA, 17 bp, Arabidopsis thaliana
atcgatcctttagacct

SEQ ID NO: 173158 - DNA, 17 bp, Arabidopsis thaliana
atcgatcgataaacctc

SEQ ID NO: 173159 - DNA, 17 bp, Arabidopsis thaliana
atcgatgggccccgtgt

SEQ ID NO: 173160 - DNA, 17 bp, Arabidopsis thaliana
atcgatgggtgagaact

SEQ ID NO: 173161 - DNA, 17 bp, Arabidopsis thaliana
atcgattccgggcgtgg

SEQ ID NO: 173162 - DNA, 17 bp, Arabidopsis thaliana
atcgattcggggcgtgg

SEQ ID NO: 173163 - DNA, 17 bp, Arabidopsis thaliana
atcgattgcgcctcgat

SEQ ID NO: 173164 - DNA, 17 bp, Arabidopsis thaliana
atcgattgttttgactc

SEQ ID NO: 173165 - DNA, 17 bp, Arabidopsis thaliana
atcgcaagttgaccttg

SEQ ID NO: 173166 - DNA, 17 bp, Arabidopsis thaliana
atcgcaggagagataga

SEQ ID NO: 173167 - DNA, 17 bp, Arabidopsis thaliana
atcgcaggagagatagc

SEQ ID NO: 173168 - DNA, 17 bp, Arabidopsis thaliana
atcgcatcctgtacgaa

SEQ ID NO: 173169 - DNA, 17 bp, Arabidopsis thaliana
atcgcatggcctctgtg

SEQ ID NO: 173170 - DNA, 17 bp, Arabidopsis thaliana
atcgcatttgttgcctt

SEQ ID NO: 173171 - DNA, 17 bp, Arabidopsis thaliana
atcgccatttctattta

SEQ ID NO: 173172 - DNA, 17 bp, Arabidopsis thaliana
atcgcgaccttcaatcc

SEQ ID NO: 173173 - DNA, 17 bp, Arabidopsis thaliana
atcgcggcgacgtgggt

SEQ ID NO: 173174 - DNA, 17 bp, Arabidopsis thaliana
atcgctcaaagtataga

SEQ ID NO: 173175 - DNA, 17 bp, Arabidopsis thaliana
atcgctgcaactctacc

SEQ ID NO: 173176 - DNA, 17 bp, Arabidopsis thaliana
atcgcttgcagagagaa

SEQ ID NO: 173177 - DNA, 17 bp, Arabidopsis thaliana
atcgctttcgaaaggcg

SEQ ID NO: 173178 - DNA, 17 bp, Arabidopsis thaliana
atcggaacctggctcta

SEQ ID NO: 173179 - DNA, 17 bp, Arabidopsis thaliana
atcggaacctggctctg

SEQ ID NO: 173180 - DNA, 17 bp, Arabidopsis thaliana
atcggaatcgaggcaac

SEQ ID NO: 173181 - DNA, 17 bp, Arabidopsis thaliana
atcggaattcgtgatgg

SEQ ID NO: 173182 - DNA, 17 bp, Arabidopsis thaliana
atcggaccaggcttcat

SEQ ID NO: 173183 - DNA, 17 bp, Arabidopsis thaliana
atcggacggtagcagac

SEQ ID NO: 173184 - DNA, 17 bp, Arabidopsis thaliana
atcggaggcggggtaca

SEQ ID NO: 173185 - DNA, 17 bp, Arabidopsis thaliana
atcggataaaccaaggt

SEQ ID NO: 173186 - DNA, 17 bp, Arabidopsis thaliana
atcggatagctagtgtt

SEQ ID NO: 173187 - DNA, 17 bp, Arabidopsis thaliana
atcggatgcgaaacggt

SEQ ID NO: 173188 - DNA, 17 bp, Arabidopsis thaliana
atcggatggtagaaaca

SEQ ID NO: 173189 - DNA, 17 bp, Arabidopsis thaliana
atcggatggtgagggac

SEQ ID NO: 173190 - DNA, 17 bp, Arabidopsis thaliana
atcggcaagttgtcctt

SEQ ID NO: 173191 - DNA, 17 bp, Arabidopsis thaliana
atcggcgcatttagtta

SEQ ID NO: 173192 - DNA, 17 bp, Arabidopsis thaliana
atcggcgcatttagttc

SEQ ID NO: 173193 - DNA, 17 bp, Arabidopsis thaliana
atcggctgccggtggcg

SEQ ID NO: 173194 - DNA, 17 bp, Arabidopsis thaliana
atcgggagcttttatct

SEQ ID NO: 173195 - DNA, 17 bp, Arabidopsis thaliana
atcgggcgtgtggtcta

SEQ ID NO: 173196 - DNA, 17 bp, Arabidopsis thaliana
atcgggtaaagccaatg

SEQ ID NO: 173197 - DNA, 17 bp, Arabidopsis thaliana
atcggtaacgttgttgc

SEQ ID NO: 173198 - DNA, 17 bp, Arabidopsis thaliana
atcggtaccccgcatct

SEQ ID NO: 173199 - DNA, 17 bp, Arabidopsis thaliana
atcggtgcgtcttttca

SEQ ID NO: 173200 - DNA, 17 bp, Arabidopsis thaliana
atcgtaacctggctctg

SEQ ID NO: 173201 - DNA, 17 bp, Arabidopsis thaliana
atcgtagttttacgatg

SEQ ID NO: 173202 - DNA, 17 bp, Arabidopsis thaliana
atcgtagttttacgttg

SEQ ID NO: 173203 - DNA, 17 bp, Arabidopsis thaliana
atcgtatctgccagcga

SEQ ID NO: 173204 - DNA, 17 bp, Arabidopsis thaliana
atcgtcggaccaggctt

SEQ ID NO: 173205 - DNA, 17 bp, Arabidopsis thaliana
atcgtctagatgaggcc

SEQ ID NO: 173206 - DNA, 17 bp, Arabidopsis thaliana
atcgtctcggtttcgtc

SEQ ID NO: 173207 - DNA, 17 bp, Arabidopsis thaliana
atcgtctgttgcaggat

SEQ ID NO: 173208 - DNA, 17 bp, Arabidopsis thaliana
atcgtcttcgtaacggc

SEQ ID NO: 173209 - DNA, 17 bp, Arabidopsis thaliana
atcgtgaagtgttttgt

SEQ ID NO: 173210 - DNA, 17 bp, Arabidopsis thaliana
atcgtggtctgcagcac

SEQ ID NO: 173211 - DNA, 17 bp, Arabidopsis thaliana
atcgtgtcggtctatga

SEQ ID NO: 173212 - DNA, 17 bp, Arabidopsis thaliana
atcgtgttccaaaagtc

SEQ ID NO: 173213 - DNA, 17 bp, Arabidopsis thaliana
atcgtgtttcaaaatac

SEQ ID NO: 173214 - DNA, 17 bp, Arabidopsis thaliana
atcgttaccccgcatct

SEQ ID NO: 173215 - DNA, 17 bp, Arabidopsis thaliana
atcgttaccccgcattt

SEQ ID NO: 173216 - DNA, 17 bp, Arabidopsis thaliana
atcgttagtagttggtg

SEQ ID NO: 173217 - DNA, 17 bp, Arabidopsis thaliana
atcgttccaattttatc

SEQ ID NO: 173218 - DNA, 17 bp, Arabidopsis thaliana
atcgttgccatcgatgg

SEQ ID NO: 173219 - DNA, 17 bp, Arabidopsis thaliana
atcgttgccccgcatct

SEQ ID NO: 173220 - DNA, 17 bp, Arabidopsis thaliana
atctaactcactctctg

SEQ ID NO: 173221 - DNA, 17 bp, Arabidopsis thaliana
atctaactcacttcctg

SEQ ID NO: 173222 - DNA, 17 bp, Arabidopsis thaliana
atctaatagaaactgaa

SEQ ID NO: 173223 - DNA, 17 bp, Arabidopsis thaliana
atctaattagtgacgca

SEQ ID NO: 173224 - DNA, 17 bp, Arabidopsis thaliana
atctaattagtgacgcg

SEQ ID NO: 173225 - DNA, 17 bp, Arabidopsis thaliana
atctaattcacaagaga

SEQ ID NO: 173226 - DNA, 17 bp, Arabidopsis thaliana
atctacaggatgcgact

SEQ ID NO: 173227 - DNA, 17 bp, Arabidopsis thaliana
atctacaggatgcgaga

SEQ ID NO: 173228 - DNA, 17 bp, Arabidopsis thaliana
atctacaggatgcggat

SEQ ID NO: 173229 - DNA, 17 bp, Arabidopsis thaliana
atctaccccgcatctcc

SEQ ID NO: 173230 - DNA, 17 bp, Arabidopsis thaliana
atctacgacagttctta

SEQ ID NO: 173231 - DNA, 17 bp, Arabidopsis thaliana
atctacgacagttcttg

SEQ ID NO: 173232 - DNA, 17 bp, Arabidopsis thaliana
atctacttacacttaaa

SEQ ID NO: 173233 - DNA, 17 bp, Arabidopsis thaliana
atctacttacacttaag

SEQ ID NO: 173234 - DNA, 17 bp, Arabidopsis thaliana
atctagatgatgcatta

SEQ ID NO: 173235 - DNA, 17 bp, Arabidopsis thaliana
atctagatgatgcattt

SEQ ID NO: 173236 - DNA, 17 bp, Arabidopsis thaliana
atctagattttcgataa

SEQ ID NO: 173237 - DNA, 17 bp, Arabidopsis thaliana
atctatagaccttttga

SEQ ID NO: 173238 - DNA, 17 bp, Arabidopsis thaliana
atctatcgggcgctgac

SEQ ID NO: 173239 - DNA, 17 bp, Arabidopsis thaliana
atctatctctacctcta

SEQ ID NO: 173240 - DNA, 17 bp, Arabidopsis thaliana
atctatgactgtgctgt

SEQ ID NO: 173241 - DNA, 17 bp, Arabidopsis thaliana
atctcaagatggcagca

SEQ ID NO: 173242 - DNA, 17 bp, Arabidopsis thaliana
atctcagatccagtttg

SEQ ID NO: 173243 - DNA, 17 bp, Arabidopsis thaliana
atctcagccttaaagga

SEQ ID NO: 173244 - DNA, 17 bp, Arabidopsis thaliana
atctcagctcagtagcc

SEQ ID NO: 173245 - DNA, 17 bp, Arabidopsis thaliana
atctcagtggatcgtgg

SEQ ID NO: 173246 - DNA, 17 bp, Arabidopsis thaliana
atctcatatgtgtggct

SEQ ID NO: 173247 - DNA, 17 bp, Arabidopsis thaliana
atctcatctgaaccacc

SEQ ID NO: 173248 - DNA, 17 bp, Arabidopsis thaliana
atctcattttcttgctg

SEQ ID NO: 173249 - DNA, 17 bp, Arabidopsis thaliana
atctccaagcgaatgaa

SEQ ID NO: 173250 - DNA, 17 bp, Arabidopsis thaliana
atctccaagcgaatgat

SEQ ID NO: 173251 - DNA, 17 bp, Arabidopsis thaliana
atctccaagggaggggg

SEQ ID NO: 173252 - DNA, 17 bp, Arabidopsis thaliana
atctccatagcttattg

SEQ ID NO: 173253 - DNA, 17 bp, Arabidopsis thaliana
atctccttgagcagttg

SEQ ID NO: 173254 - DNA, 17 bp, Arabidopsis thaliana
atctcgaagatggaaat

SEQ ID NO: 173255 - DNA, 17 bp, Arabidopsis thaliana
atctcgtggttgtatgg

SEQ ID NO: 173256 - DNA, 17 bp, Arabidopsis thaliana
atctcgtgtggaacaaa

SEQ ID NO: 173257 - DNA, 17 bp, Arabidopsis thaliana
atctctaggtctcgtgt

SEQ ID NO: 173258 - DNA, 17 bp, Arabidopsis thaliana
atctctcagatgtgccc

SEQ ID NO: 173259 - DNA, 17 bp, Arabidopsis thaliana
atctctcatgaccgcat

SEQ ID NO: 173260 - DNA, 17 bp, Arabidopsis thaliana
atctcttctggcggagg

SEQ ID NO: 173261 - DNA, 17 bp, Arabidopsis thaliana
atctctttctaaacgta

SEQ ID NO: 173262 - DNA, 17 bp, Arabidopsis thaliana
atctctttctaaacgtt

SEQ ID NO: 173263 - DNA, 17 bp, Arabidopsis thaliana
atctgaagctagcttct

SEQ ID NO: 173264 - DNA, 17 bp, Arabidopsis thaliana
atctgacaatcattttg

SEQ ID NO: 173265 - DNA, 17 bp, Arabidopsis thaliana
atctgagacctaggcag

SEQ ID NO: 173266 - DNA, 17 bp, Arabidopsis thaliana
atctgagccaaggatga

SEQ ID NO: 173267 - DNA, 17 bp, Arabidopsis thaliana
atctgagcctctgtggt

SEQ ID NO: 173268 - DNA, 17 bp, Arabidopsis thaliana
atctgagctacatcccc

SEQ ID NO: 173269 - DNA, 17 bp, Arabidopsis thaliana
atctgatatgtgggcca

SEQ ID NO: 173270 - DNA, 17 bp, Arabidopsis thaliana
atctgatatgtgggtca

SEQ ID NO: 173271 - DNA, 17 bp, Arabidopsis thaliana
atctgattgagccgcgc

SEQ ID NO: 173272 - DNA, 17 bp, Arabidopsis thaliana
atctgcaaaggtatgag

SEQ ID NO: 173273 - DNA, 17 bp, Arabidopsis thaliana
atctgcaagtttggtcc

SEQ ID NO: 173274 - DNA, 17 bp, Arabidopsis thaliana
atctgcagatgaagact

SEQ ID NO: 173275 - DNA, 17 bp, Arabidopsis thaliana
atctgccgacccatcca

SEQ ID NO: 173276 - DNA, 17 bp, Arabidopsis thaliana
atctgccgactcatcca

SEQ ID NO: 173277 - DNA, 17 bp, Arabidopsis thaliana
atctgcgacatgtatgg

SEQ ID NO: 173278 - DNA, 17 bp, Arabidopsis thaliana
atctgctgactcatcca

SEQ ID NO: 173279 - DNA, 17 bp, Arabidopsis thaliana
atctgcttagtggaaag

SEQ ID NO: 173280 - DNA, 17 bp, Arabidopsis thaliana
atctggaatacttgaac

SEQ ID NO: 173281 - DNA, 17 bp, Arabidopsis thaliana
atctggataggctaagg

SEQ ID NO: 173282 - DNA, 17 bp, Arabidopsis thaliana
atctggcggaccaggtt

SEQ ID NO: 173283 - DNA, 17 bp, Arabidopsis thaliana
atctggttatccggcgg

SEQ ID NO: 173284 - DNA, 17 bp, Arabidopsis thaliana
atctgtaaaacgagaaa

SEQ ID NO: 173285 - DNA, 17 bp, Arabidopsis thaliana
atctgttagggtttctt

SEQ ID NO: 173286 - DNA, 17 bp, Arabidopsis thaliana
atcttaagtgtcgtctt

SEQ ID NO: 173287 - DNA, 17 bp, Arabidopsis thaliana
atcttaatgacatcttt

SEQ ID NO: 173288 - DNA, 17 bp, Arabidopsis thaliana
atcttaggctgagcgtg

SEQ ID NO: 173289 - DNA, 17 bp, Arabidopsis thaliana
atcttaggttatgaatt

SEQ ID NO: 173290 - DNA, 17 bp, Arabidopsis thaliana
atcttagtcgcatccat

SEQ ID NO: 173291 - DNA, 17 bp, Arabidopsis thaliana
atcttagtcgcatcctg

SEQ ID NO: 173292 - DNA, 17 bp, Arabidopsis thaliana
atcttcacatgcatcgc

SEQ ID NO: 173293 - DNA, 17 bp, Arabidopsis thaliana
atcttcaggaaggagaa

SEQ ID NO: 173294 - DNA, 17 bp, Arabidopsis thaliana
atcttcaggaatttgca

SEQ ID NO: 173295 - DNA, 17 bp, Arabidopsis thaliana
atcttccgacaaaagaa

SEQ ID NO: 173296 - DNA, 17 bp, Arabidopsis thaliana
atcttccgacaaaagga

SEQ ID NO: 173297 - DNA, 17 bp, Arabidopsis thaliana
atcttcctctttgttta

SEQ ID NO: 173298 - DNA, 17 bp, Arabidopsis thaliana
atcttcgagatttctca

SEQ ID NO: 173299 - DNA, 17 bp, Arabidopsis thaliana
atcttcgaggcctatta

SEQ ID NO: 173300 - DNA, 17 bp, Arabidopsis thaliana
atcttcgatgtgcgcga

SEQ ID NO: 173301 - DNA, 17 bp, Arabidopsis thaliana
atcttcgtccatctaga

SEQ ID NO: 173302 - DNA, 17 bp, Arabidopsis thaliana
atcttcgttgtctgttc

SEQ ID NO: 173303 - DNA, 17 bp, Arabidopsis thaliana
atcttctcggctacgta

SEQ ID NO: 173304 - DNA, 17 bp, Arabidopsis thaliana
atcttgagattgtaagg

SEQ ID NO: 173305 - DNA, 17 bp, Arabidopsis thaliana
atcttgagccatttctt

SEQ ID NO: 173306 - DNA, 17 bp, Arabidopsis thaliana
atcttgaggtccctact

SEQ ID NO: 173307 - DNA, 17 bp, Arabidopsis thaliana
atcttgataatctttgt

SEQ ID NO: 173308 - DNA, 17 bp, Arabidopsis thaliana
atcttgcaggtaggcca

SEQ ID NO: 173309 - DNA, 17 bp, Arabidopsis thaliana
atcttgcaggtaggtag

SEQ ID NO: 173310 - DNA, 17 bp, Arabidopsis thaliana
atcttggtcttagtcag

SEQ ID NO: 173311 - DNA, 17 bp, Arabidopsis thaliana
atctttaaacccaaagt

SEQ ID NO: 173312 - DNA, 17 bp, Arabidopsis thaliana
atctttctggattcact

SEQ ID NO: 173313 - DNA, 17 bp, Arabidopsis thaliana
atctttgagacaagcat

SEQ ID NO: 173314 - DNA, 17 bp, Arabidopsis thaliana
atctttgcgcttggggc

SEQ ID NO: 173315 - DNA, 17 bp, Arabidopsis thaliana
atctttggattgaagga

SEQ ID NO: 173316 - DNA, 17 bp, Arabidopsis thaliana
atctttggattgaaggg

SEQ ID NO: 173317 - DNA, 17 bp, Arabidopsis thaliana
atctttggcattctgtc

SEQ ID NO: 173318 - DNA, 17 bp, Arabidopsis thaliana
atctttggtgttctgga

SEQ ID NO: 173319 - DNA, 17 bp, Arabidopsis thaliana
atctttggttcgcgggt

SEQ ID NO: 173320 - DNA, 17 bp, Arabidopsis thaliana
atctttgtgatggaaga

SEQ ID NO: 173321 - DNA, 17 bp, Arabidopsis thaliana
atgaaagtgactacatt

SEQ ID NO: 173322 - DNA, 17 bp, Arabidopsis thaliana
atgaacctgcggaagga

SEQ ID NO: 173323 - DNA, 17 bp, Arabidopsis thaliana
atgaacgaattcagact

SEQ ID NO: 173324 - DNA, 17 bp, Arabidopsis thaliana
atgaagaacgtagcaaa

SEQ ID NO: 173325 - DNA, 17 bp, Arabidopsis thaliana
atgaagaggacttggaa

SEQ ID NO: 173326 - DNA, 17 bp, Arabidopsis thaliana
atgaagattgggaggca

SEQ ID NO: 173327 - DNA, 17 bp, Arabidopsis thaliana
atgaatcccaagataca

SEQ ID NO: 173328 - DNA, 17 bp, Arabidopsis thaliana
atgaatggaatggttga

SEQ ID NO: 173329 - DNA, 17 bp, Arabidopsis thaliana
atgaatggggttttcct

SEQ ID NO: 173330 - DNA, 17 bp, Arabidopsis thaliana
atgaatggggttttttt

SEQ ID NO: 173331 - DNA, 17 bp, Arabidopsis thaliana
atgacaattttgcttca

SEQ ID NO: 173332 - DNA, 17 bp, Arabidopsis thaliana
atgacactgatgctgac

SEQ ID NO: 173333 - DNA, 17 bp, Arabidopsis thaliana
atgacactgatgcttgc

SEQ ID NO: 173334 - DNA, 17 bp, Arabidopsis thaliana
atgacctgttctcgctt

SEQ ID NO: 173335 - DNA, 17 bp, Arabidopsis thaliana
atgacggtcaagacctc

SEQ ID NO: 173336 - DNA, 17 bp, Arabidopsis thaliana
atgactcagttgtcgca

SEQ ID NO: 173337 - DNA, 17 bp, Arabidopsis thaliana
atgactggaccagctga

SEQ ID NO: 173338 - DNA, 17 bp, Arabidopsis thaliana
atgactgtgctgtagat

SEQ ID NO: 173339 - DNA, 17 bp, Arabidopsis thaliana
atgacttattgttgtgt

SEQ ID NO: 173340 - DNA, 17 bp, Arabidopsis thaliana
atgacttgagaggtgta

SEQ ID NO: 173341 - DNA, 17 bp, Arabidopsis thaliana
atgagaccattgcgtcg

SEQ ID NO: 173342 - DNA, 17 bp, Arabidopsis thaliana
atgagtaggagggcgcg

SEQ ID NO: 173343 - DNA, 17 bp, Arabidopsis thaliana
atgagtctttggctttt

SEQ ID NO: 173344 - DNA, 17 bp, Arabidopsis thaliana
atgataaagcggtgtta

SEQ ID NO: 173345 - DNA, 17 bp, Arabidopsis thaliana
atgataactcgacggat

SEQ ID NO: 173346 - DNA, 17 bp, Arabidopsis thaliana
atgatactcattttcga

SEQ ID NO: 173347 - DNA, 17 bp, Arabidopsis thaliana
atgatatcttccatttc

SEQ ID NO: 173348 - DNA, 17 bp, Arabidopsis thaliana
atgatatttgtagtaat

SEQ ID NO: 173349 - DNA, 17 bp, Arabidopsis thaliana
atgatcaccaaatgtat

SEQ ID NO: 173350 - DNA, 17 bp, Arabidopsis thaliana
atgatgacagcgaagca

SEQ ID NO: 173351 - DNA, 17 bp, Arabidopsis thaliana
atgatgatgtcggacca

SEQ ID NO: 173352 - DNA, 17 bp, Arabidopsis thaliana
atgatgcacactgatgc

SEQ ID NO: 173353 - DNA, 17 bp, Arabidopsis thaliana
atgatgcgcaaatgcgg

SEQ ID NO: 173354 - DNA, 17 bp, Arabidopsis thaliana
atgatggtagtccaaca

SEQ ID NO: 173355 - DNA, 17 bp, Arabidopsis thaliana
atgatgtttttgtttac

SEQ ID NO: 173356 - DNA, 17 bp, Arabidopsis thaliana
atgattaacagggacag

SEQ ID NO: 173357 - DNA, 17 bp, Arabidopsis thaliana
atgattaccaaatgtat

SEQ ID NO: 173358 - DNA, 17 bp, Arabidopsis thaliana
atgattagggacaatgt

SEQ ID NO: 173359 - DNA, 17 bp, Arabidopsis thaliana
atgattagggactcggg

SEQ ID NO: 173360 - DNA, 17 bp, Arabidopsis thaliana
atgcaaaagagtaagat

SEQ ID NO: 173361 - DNA, 17 bp, Arabidopsis thaliana
atgcaaagatgcagatc

SEQ ID NO: 173362 - DNA, 17 bp, Arabidopsis thaliana
atgcaaatacagcaact

SEQ ID NO: 173363 - DNA, 17 bp, Arabidopsis thaliana
atgcaactgatgctgac

SEQ ID NO: 173364 - DNA, 17 bp, Arabidopsis thaliana
atgcacacgatgctgac

SEQ ID NO: 173365 - DNA, 17 bp, Arabidopsis thaliana
atgcacactgatgcaca

SEQ ID NO: 173366 - DNA, 17 bp, Arabidopsis thaliana
atgcacactgatgcgac

SEQ ID NO: 173367 - DNA, 17 bp, Arabidopsis thaliana
atgcacactgatgcgga

SEQ ID NO: 173368 - DNA, 17 bp, Arabidopsis thaliana
atgcacactgatgctaa

SEQ ID NO: 173369 - DNA, 17 bp, Arabidopsis thaliana
atgcacactgatgctga

SEQ ID NO: 173370 - DNA, 17 bp, Arabidopsis thaliana
atgcacactgatgttga

SEQ ID NO: 173371 - DNA, 17 bp, Arabidopsis thaliana
atgcacagagagaaacc

SEQ ID NO: 173372 - DNA, 17 bp, Arabidopsis thaliana
atgcacgtgcataaacg

SEQ ID NO: 173373 - DNA, 17 bp, Arabidopsis thaliana
atgcactgatgctgaca

SEQ ID NO: 173374 - DNA, 17 bp, Arabidopsis thaliana
atgcactgcctcttccc

SEQ ID NO: 173375 - DNA, 17 bp, Arabidopsis thaliana
atgcaggcagcttcaga

SEQ ID NO: 173376 - DNA, 17 bp, Arabidopsis thaliana
atgcatcgccatttcta

SEQ ID NO: 173377 - DNA, 17 bp, Arabidopsis thaliana
atgcatgtgagctcttt

SEQ ID NO: 173378 - DNA, 17 bp, Arabidopsis thaliana
atgcattagccgacatc

SEQ ID NO: 173379 - DNA, 17 bp, Arabidopsis thaliana
atgccaaggatgacttg

SEQ ID NO: 173380 - DNA, 17 bp, Arabidopsis thaliana
atgccaatggatttttt

SEQ ID NO: 173381 - DNA, 17 bp, Arabidopsis thaliana
atgccactgatgctgac

SEQ ID NO: 173382 - DNA, 17 bp, Arabidopsis thaliana
atgccatatctcaggag

SEQ ID NO: 173383 - DNA, 17 bp, Arabidopsis thaliana
atgcccatgtccatgac

SEQ ID NO: 173384 - DNA, 17 bp, Arabidopsis thaliana
atgccgaccagggatca

SEQ ID NO: 173385 - DNA, 17 bp, Arabidopsis thaliana
atgccggcagcttcaga

SEQ ID NO: 173386 - DNA, 17 bp, Arabidopsis thaliana
atgcctctcgactactg

SEQ ID NO: 173387 - DNA, 17 bp, Arabidopsis thaliana
atgcctctctcttggag

SEQ ID NO: 173388 - DNA, 17 bp, Arabidopsis thaliana
atgcctggctccctgta

SEQ ID NO: 173389 - DNA, 17 bp, Arabidopsis thaliana
atgcgggacggaagctg

SEQ ID NO: 173390 - DNA, 17 bp, Arabidopsis thaliana
atgcgggatgaaccgga

SEQ ID NO: 173391 - DNA, 17 bp, Arabidopsis thaliana
atgcgtcctatcttcct

SEQ ID NO: 173392 - DNA, 17 bp, Arabidopsis thaliana
atgcgtcctggtcggat

SEQ ID NO: 173393 - DNA, 17 bp, Arabidopsis thaliana
atgcgtcgcttctagcc

SEQ ID NO: 173394 - DNA, 17 bp, Arabidopsis thaliana
atgcgtgagaactgtta

SEQ ID NO: 173395 - DNA, 17 bp, Arabidopsis thaliana
atgcgtgaggctggttt

SEQ ID NO: 173396 - DNA, 17 bp, Arabidopsis thaliana
atgctcaggagggatag

SEQ ID NO: 173397 - DNA, 17 bp, Arabidopsis thaliana
atgctcgcaggaccccc

SEQ ID NO: 173398 - DNA, 17 bp, Arabidopsis thaliana
atgctgaccggatgtca

SEQ ID NO: 173399 - DNA, 17 bp, Arabidopsis thaliana
atgctgctcagctgtat

SEQ ID NO: 173400 - DNA, 17 bp, Arabidopsis thaliana
atgctggcagcttcaaa

SEQ ID NO: 173401 - DNA, 17 bp, Arabidopsis thaliana
atgctggcagcttcaat

SEQ ID NO: 173402 - DNA, 17 bp, Arabidopsis thaliana
atgctggcagcttcaga

SEQ ID NO: 173403 - DNA, 17 bp, Arabidopsis thaliana
atgctggcagcttcagc

SEQ ID NO: 173404 - DNA, 17 bp, Arabidopsis thaliana
atgctggcagcttcagg

SEQ ID NO: 173405 - DNA, 17 bp, Arabidopsis thaliana
atgctggcagcttcagt

SEQ ID NO: 173406 - DNA, 17 bp, Arabidopsis thaliana
atgctggcagcttcatc

SEQ ID NO: 173407 - DNA, 17 bp, Arabidopsis thaliana
atgctggcagcttcctt

SEQ ID NO: 173408 - DNA, 17 bp, Arabidopsis thaliana
atgctggcggcttcaga

SEQ ID NO: 173409 - DNA, 17 bp, Arabidopsis thaliana
atgctgtgctgcgaact

SEQ ID NO: 173410 - DNA, 17 bp, Arabidopsis thaliana
atgcttcaatacgaacc

SEQ ID NO: 173411 - DNA, 17 bp, Arabidopsis thaliana
atgcttctactgctctt

SEQ ID NO: 173412 - DNA, 17 bp, Arabidopsis thaliana
atgcttctcgactactc

SEQ ID NO: 173413 - DNA, 17 bp, Arabidopsis thaliana
atgcttctgattcattg

SEQ ID NO: 173414 - DNA, 17 bp, Arabidopsis thaliana
atgcttcttcgctacac

SEQ ID NO: 173415 - DNA, 17 bp, Arabidopsis thaliana
atgcttgtttgccgtgt

SEQ ID NO: 173416 - DNA, 17 bp, Arabidopsis thaliana
atgctttctacaggaaa

SEQ ID NO: 173417 - DNA, 17 bp, Arabidopsis thaliana
atggaaacgcctgtgaa

SEQ ID NO: 173418 - DNA, 17 bp, Arabidopsis thaliana
atggaaggcgattgtca

SEQ ID NO: 173419 - DNA, 17 bp, Arabidopsis thaliana
atggagtgatgcttctc

SEQ ID NO: 173420 - DNA, 17 bp, Arabidopsis thaliana
atggatcaaagttttct

SEQ ID NO: 173421 - DNA, 17 bp, Arabidopsis thaliana
atggatcaattccaatt

SEQ ID NO: 173422 - DNA, 17 bp, Arabidopsis thaliana
atggatcagaatcttga

SEQ ID NO: 173423 - DNA, 17 bp, Arabidopsis thaliana
atggatcagatggatca

SEQ ID NO: 173424 - DNA, 17 bp, Arabidopsis thaliana
atggatcagtcggattt

SEQ ID NO: 173425 - DNA, 17 bp, Arabidopsis thaliana
atggatcgaccgcatag

SEQ ID NO: 173426 - DNA, 17 bp, Arabidopsis thaliana
atggatcgatggtagtt

SEQ ID NO: 173427 - DNA, 17 bp, Arabidopsis thaliana
atggatcgcaaaggatt

SEQ ID NO: 173428 - DNA, 17 bp, Arabidopsis thaliana
atggatcgcatcccgtt

SEQ ID NO: 173429 - DNA, 17 bp, Arabidopsis thaliana
atggatcgcatcctgta

SEQ ID NO: 173430 - DNA, 17 bp, Arabidopsis thaliana
atggatcgcccctgtag

SEQ ID NO: 173431 - DNA, 17 bp, Arabidopsis thaliana
atggatcgccgcgatcc

SEQ ID NO: 173432 - DNA, 17 bp, Arabidopsis thaliana
atggatcggaggattca

SEQ ID NO: 173433 - DNA, 17 bp, Arabidopsis thaliana
atggatcggaggtcgca

SEQ ID NO: 173434 - DNA, 17 bp, Arabidopsis thaliana
atggatcgtggcagagt

SEQ ID NO: 173435 - DNA, 17 bp, Arabidopsis thaliana
atggatctaccgaaagt

SEQ ID NO: 173436 - DNA, 17 bp, Arabidopsis thaliana
atggatctcgatcctcg

SEQ ID NO: 173437 - DNA, 17 bp, Arabidopsis thaliana
atggatctcgtgttggt

SEQ ID NO: 173438 - DNA, 17 bp, Arabidopsis thaliana
atggatctcttcttcca

SEQ ID NO: 173439 - DNA, 17 bp, Arabidopsis thaliana
atggatctgaaaatggt

SEQ ID NO: 173440 - DNA, 17 bp, Arabidopsis thaliana
atggatctgagcctctg

SEQ ID NO: 173441 - DNA, 17 bp, Arabidopsis thaliana
atggatctgccgttgtc

SEQ ID NO: 173442 - DNA, 17 bp, Arabidopsis thaliana
atggatctggagaagca

SEQ ID NO: 173443 - DNA, 17 bp, Arabidopsis thaliana
atggatctggtgatctt

SEQ ID NO: 173444 - DNA, 17 bp, Arabidopsis thaliana
atggatcttagtcgcat

SEQ ID NO: 173445 - DNA, 17 bp, Arabidopsis thaliana
atggatcttggcatgca

SEQ ID NO: 173446 - DNA, 17 bp, Arabidopsis thaliana
atggatcttggcattct

SEQ ID NO: 173447 - DNA, 17 bp, Arabidopsis thaliana
atggatgactcagccct

SEQ ID NO: 173448 - DNA, 17 bp, Arabidopsis thaliana
atggattaacgagattc

SEQ ID NO: 173449 - DNA, 17 bp, Arabidopsis thaliana
atggattttttttcata

SEQ ID NO: 173450 - DNA, 17 bp, Arabidopsis thaliana
atggcgatgcatgtgaa

SEQ ID NO: 173451 - DNA, 17 bp, Arabidopsis thaliana
atggctatccctacaag

SEQ ID NO: 173452 - DNA, 17 bp, Arabidopsis thaliana
atggctgggtttcggga

SEQ ID NO: 173453 - DNA, 17 bp, Arabidopsis thaliana
atggctgggttttggga

SEQ ID NO: 173454 - DNA, 17 bp, Arabidopsis thaliana
atgggagatgtccggaa

SEQ ID NO: 173455 - DNA, 17 bp, Arabidopsis thaliana
atgggatatcagcccga

SEQ ID NO: 173456 - DNA, 17 bp, Arabidopsis thaliana
atgggatggacaacaaa

SEQ ID NO: 173457 - DNA, 17 bp, Arabidopsis thaliana
atgggatggagaacaaa

SEQ ID NO: 173458 - DNA, 17 bp, Arabidopsis thaliana
atgggccgaagaacgcc

SEQ ID NO: 173459 - DNA, 17 bp, Arabidopsis thaliana
atgggcgactctcgaaa

SEQ ID NO: 173460 - DNA, 17 bp, Arabidopsis thaliana
atgggtgagaactgtta

SEQ ID NO: 173461 - DNA, 17 bp, Arabidopsis thaliana
atgggtggcaaacaaag

SEQ ID NO: 173462 - DNA, 17 bp, Arabidopsis thaliana
atgggtgttgtgtagtc

SEQ ID NO: 173463 - DNA, 17 bp, Arabidopsis thaliana
atgggttagtcgatcct

SEQ ID NO: 173464 - DNA, 17 bp, Arabidopsis thaliana
atgggttgagccttgtg

SEQ ID NO: 173465 - DNA, 17 bp, Arabidopsis thaliana
atgggtttttttttcat

SEQ ID NO: 173466 - DNA, 17 bp, Arabidopsis thaliana
atggtaatgatttgtct

SEQ ID NO: 173467 - DNA, 17 bp, Arabidopsis thaliana
atggtagaaacataggt

SEQ ID NO: 173468 - DNA, 17 bp, Arabidopsis thaliana
atggtagtccaacaata

SEQ ID NO: 173469 - DNA, 17 bp, Arabidopsis thaliana
atggtagttcaagtatt

SEQ ID NO: 173470 - DNA, 17 bp, Arabidopsis thaliana
atggtatctgatggcgt

SEQ ID NO: 173471 - DNA, 17 bp, Arabidopsis thaliana
atggtcaaagtaggcaa

SEQ ID NO: 173472 - DNA, 17 bp, Arabidopsis thaliana
atggtccctgcggatgc

SEQ ID NO: 173473 - DNA, 17 bp, Arabidopsis thaliana
atggtcgaagtaggcaa

SEQ ID NO: 173474 - DNA, 17 bp, Arabidopsis thaliana
atggtgaactatgcctg

SEQ ID NO: 173475 - DNA, 17 bp, Arabidopsis thaliana
atggtgaatggttagat

SEQ ID NO: 173476 - DNA, 17 bp, Arabidopsis thaliana
atgtaaagacagtcctt

SEQ ID NO: 173477 - DNA, 17 bp, Arabidopsis thaliana
atgtaactaacttcagg

SEQ ID NO: 173478 - DNA, 17 bp, Arabidopsis thaliana
atgtagcacgcgtgcgg

SEQ ID NO: 173479 - DNA, 17 bp, Arabidopsis thaliana
atgtatggtcgaagtag

SEQ ID NO: 173480 - DNA, 17 bp, Arabidopsis thaliana
atgtatgtgcctataat

SEQ ID NO: 173481 - DNA, 17 bp, Arabidopsis thaliana
atgtattcaacgagttc

SEQ ID NO: 173482 - DNA, 17 bp, Arabidopsis thaliana
atgtattgggagttgta

SEQ ID NO: 173483 - DNA, 17 bp, Arabidopsis thaliana
atgtcaatggatctgtt

SEQ ID NO: 173484 - DNA, 17 bp, Arabidopsis thaliana
atgtcaccatcactgat

SEQ ID NO: 173485 - DNA, 17 bp, Arabidopsis thaliana
atgtccaatgtctttct

SEQ ID NO: 173486 - DNA, 17 bp, Arabidopsis thaliana
atgtccaatgtcttttc

SEQ ID NO: 173487 - DNA, 17 bp, Arabidopsis thaliana
atgtcgaaggaactcgg

SEQ ID NO: 173488 - DNA, 17 bp, Arabidopsis thaliana
atgtcgagtaaacgaag

SEQ ID NO: 173489 - DNA, 17 bp, Arabidopsis thaliana
atgtcgcagatctcaaa

SEQ ID NO: 173490 - DNA, 17 bp, Arabidopsis thaliana
atgtctaaggggaactg

SEQ ID NO: 173491 - DNA, 17 bp, Arabidopsis thaliana
atgtctattttcacagg

SEQ ID NO: 173492 - DNA, 17 bp, Arabidopsis thaliana
atgtctcagcacagcgg

SEQ ID NO: 173493 - DNA, 17 bp, Arabidopsis thaliana
atgtctgagcggttgaa

SEQ ID NO: 173494 - DNA, 17 bp, Arabidopsis thaliana
atgtcttttctagttcg

SEQ ID NO: 173495 - DNA, 17 bp, Arabidopsis thaliana
atgtgaagaatctcctc

SEQ ID NO: 173496 - DNA, 17 bp, Arabidopsis thaliana
atgtgactctttggaac

SEQ ID NO: 173497 - DNA, 17 bp, Arabidopsis thaliana
atgtgagttttccttga

SEQ ID NO: 173498 - DNA, 17 bp, Arabidopsis thaliana
atgtgatgtgatgtgat

SEQ ID NO: 173499 - DNA, 17 bp, Arabidopsis thaliana
atgtgcaaatgctgcta

SEQ ID NO: 173500 - DNA, 17 bp, Arabidopsis thaliana
atgtgcaaatgctttct

SEQ ID NO: 173501 - DNA, 17 bp, Arabidopsis thaliana
atgtgcgcgacttatat

SEQ ID NO: 173502 - DNA, 17 bp, Arabidopsis thaliana
atgtgctgaagaagaac

SEQ ID NO: 173503 - DNA, 17 bp, Arabidopsis thaliana
atgtgtcagtttcgttc

SEQ ID NO: 173504 - DNA, 17 bp, Arabidopsis thaliana
atgtgtcgagcattgga

SEQ ID NO: 173505 - DNA, 17 bp, Arabidopsis thaliana
atgtgttcaagtaaatg

SEQ ID NO: 173506 - DNA, 17 bp, Arabidopsis thaliana
atgtgttcaattaaata

SEQ ID NO: 173507 - DNA, 17 bp, Arabidopsis thaliana
atgttatcttcgatgtg

SEQ ID NO: 173508 - DNA, 17 bp, Arabidopsis thaliana
atgttatgcgtcctatc

SEQ ID NO: 173509 - DNA, 17 bp, Arabidopsis thaliana
atgttatgctcaaccgg

SEQ ID NO: 173510 - DNA, 17 bp, Arabidopsis thaliana
atgttcaatagatttag

SEQ ID NO: 173511 - DNA, 17 bp, Arabidopsis thaliana
atgttctgggccgcacg

SEQ ID NO: 173512 - DNA, 17 bp, Arabidopsis thaliana
atgttgcttataggact

SEQ ID NO: 173513 - DNA, 17 bp, Arabidopsis thaliana
atgttggacttagaata

SEQ ID NO: 173514 - DNA, 17 bp, Arabidopsis thaliana
atgttggtcacaacaat

SEQ ID NO: 173515 - DNA, 17 bp, Arabidopsis thaliana
atgtttacttatcgact

SEQ ID NO: 173516 - DNA, 17 bp, Arabidopsis thaliana
atgtttgaccccataga

SEQ ID NO: 173517 - DNA, 17 bp, Arabidopsis thaliana
atgtttgtggattcgat

SEQ ID NO: 173518 - DNA, 17 bp, Arabidopsis thaliana
atgtttttctacttttt

SEQ ID NO: 173519 - DNA, 17 bp, Arabidopsis thaliana
atgtttttgcgagtcca

SEQ ID NO: 173520 - DNA, 17 bp, Arabidopsis thaliana
attaaaacagatgctgc

SEQ ID NO: 173521 - DNA, 17 bp, Arabidopsis thaliana
attaaatcgcggtgtat

SEQ ID NO: 173522 - DNA, 17 bp, Arabidopsis thaliana
attaacagggacagtcg

SEQ ID NO: 173523 - DNA, 17 bp, Arabidopsis thaliana
attaacgcttggacccg

SEQ ID NO: 173524 - DNA, 17 bp, Arabidopsis thaliana
attaactgagaacgata

SEQ ID NO: 173525 - DNA, 17 bp, Arabidopsis thaliana
attaagacagcaggacg

SEQ ID NO: 173526 - DNA, 17 bp, Arabidopsis thaliana
attaagccatgcatgtg

SEQ ID NO: 173527 - DNA, 17 bp, Arabidopsis thaliana
attaagtactgatgatg

SEQ ID NO: 173528 - DNA, 17 bp, Arabidopsis thaliana
attaatacatgggatgt

SEQ ID NO: 173529 - DNA, 17 bp, Arabidopsis thaliana
attaatgcgtttgtgtg

SEQ ID NO: 173530 - DNA, 17 bp, Arabidopsis thaliana
attaatgtgaatgtttc

SEQ ID NO: 173531 - DNA, 17 bp, Arabidopsis thaliana
attacaatccgtaacaa

SEQ ID NO: 173532 - DNA, 17 bp, Arabidopsis thaliana
attaccacatcaaattg

SEQ ID NO: 173533 - DNA, 17 bp, Arabidopsis thaliana
attaccaccgagcggcg

SEQ ID NO: 173534 - DNA, 17 bp, Arabidopsis thaliana
attaccattcaaagcac

SEQ ID NO: 173535 - DNA, 17 bp, Arabidopsis thaliana
attacccaatcctgaca

SEQ ID NO: 173536 - DNA, 17 bp, Arabidopsis thaliana
attaccgagtgcttgca

SEQ ID NO: 173537 - DNA, 17 bp, Arabidopsis thaliana
attaccgcggacggtgt

SEQ ID NO: 173538 - DNA, 17 bp, Arabidopsis thaliana
attaccgcggctgctgg

SEQ ID NO: 173539 - DNA, 17 bp, Arabidopsis thaliana
attactccattgttcct

SEQ ID NO: 173540 - DNA, 17 bp, Arabidopsis thaliana
attactgattttcttga

SEQ ID NO: 173541 - DNA, 17 bp, Arabidopsis thaliana
attagaaatttaggata

SEQ ID NO: 173542 - DNA, 17 bp, Arabidopsis thaliana
attagaacaaggttgta

SEQ ID NO: 173543 - DNA, 17 bp, Arabidopsis thaliana
attagaacaaggttgtt

SEQ ID NO: 173544 - DNA, 17 bp, Arabidopsis thaliana
attagaggcattggggg

SEQ ID NO: 173545 - DNA, 17 bp, Arabidopsis thaliana
attagaggtagagataa

SEQ ID NO: 173546 - DNA, 17 bp, Arabidopsis thaliana
attagatctgacaatca

SEQ ID NO: 173547 - DNA, 17 bp, Arabidopsis thaliana
attagatgggctttgta

SEQ ID NO: 173548 - DNA, 17 bp, Arabidopsis thaliana
attagattactctcaaa

SEQ ID NO: 173549 - DNA, 17 bp, Arabidopsis thaliana
attagggacaatgttta

SEQ ID NO: 173550 - DNA, 17 bp, Arabidopsis thaliana
attagtaggcccaggat

SEQ ID NO: 173551 - DNA, 17 bp, Arabidopsis thaliana
attagtcgcatcctgta

SEQ ID NO: 173552 - DNA, 17 bp, Arabidopsis thaliana
attagtcggcttgtccc

SEQ ID NO: 173553 - DNA, 17 bp, Arabidopsis thaliana
attagtgagacgctata

SEQ ID NO: 173554 - DNA, 17 bp, Arabidopsis thaliana
attagtgagatttggga

SEQ ID NO: 173555 - DNA, 17 bp, Arabidopsis thaliana
attagtgatgccaatgg

SEQ ID NO: 173556 - DNA, 17 bp, Arabidopsis thaliana
attagtggatgatgatg

SEQ ID NO: 173557 - DNA, 17 bp, Arabidopsis thaliana
attagttatgccaatgg

SEQ ID NO: 173558 - DNA, 17 bp, Arabidopsis thaliana
attagttgatcttgtta

SEQ ID NO: 173559 - DNA, 17 bp, Arabidopsis thaliana
attatcaagatccatct

SEQ ID NO: 173560 - DNA, 17 bp, Arabidopsis thaliana
attatcccccatgtttt

SEQ ID NO: 173561 - DNA, 17 bp, Arabidopsis thaliana
attatcccccgcgtttt

SEQ ID NO: 173562 - DNA, 17 bp, Arabidopsis thaliana
attatcccccgtgtttt

SEQ ID NO: 173563 - DNA, 17 bp, Arabidopsis thaliana
attatcctccgtgtttt

SEQ ID NO: 173564 - DNA, 17 bp, Arabidopsis thaliana
attatgacagagctttt

SEQ ID NO: 173565 - DNA, 17 bp, Arabidopsis thaliana
attatgactgaacgcct

SEQ ID NO: 173566 - DNA, 17 bp, Arabidopsis thaliana
attatgatggtagtcca

SEQ ID NO: 173567 - DNA, 17 bp, Arabidopsis thaliana
attatgatggtggtcca

SEQ ID NO: 173568 - DNA, 17 bp, Arabidopsis thaliana
attatgcgatctctttg

SEQ ID NO: 173569 - DNA, 17 bp, Arabidopsis thaliana
attatttgatcgttgct

SEQ ID NO: 173570 - DNA, 17 bp, Arabidopsis thaliana
attcaaagcacctcata

SEQ ID NO: 173571 - DNA, 17 bp, Arabidopsis thaliana
attcaaataattcgggt

SEQ ID NO: 173572 - DNA, 17 bp, Arabidopsis thaliana
attcaaggacagattga

SEQ ID NO: 173573 - DNA, 17 bp, Arabidopsis thaliana
attcaaggacagattgg

SEQ ID NO: 173574 - DNA, 17 bp, Arabidopsis thaliana
attcaaggcggtccgaa

SEQ ID NO: 173575 - DNA, 17 bp, Arabidopsis thaliana
attcaatgatcgagcgt

SEQ ID NO: 173576 - DNA, 17 bp, Arabidopsis thaliana
attcacaagagacttta

SEQ ID NO: 173577 - DNA, 17 bp, Arabidopsis thaliana
attcacaagagactttt

SEQ ID NO: 173578 - DNA, 17 bp, Arabidopsis thaliana
attcacactgatgctga

SEQ ID NO: 173579 - DNA, 17 bp, Arabidopsis thaliana
attcacgtttttgtagt

SEQ ID NO: 173580 - DNA, 17 bp, Arabidopsis thaliana
attcagagcactgggca

SEQ ID NO: 173581 - DNA, 17 bp, Arabidopsis thaliana
attcagccctttgtcgc

SEQ ID NO: 173582 - DNA, 17 bp, Arabidopsis thaliana
attcaggtccaatacgt

SEQ ID NO: 173583 - DNA, 17 bp, Arabidopsis thaliana
attcagtagggacctca

SEQ ID NO: 173584 - DNA, 17 bp, Arabidopsis thaliana
attcagtctcagaatcg

SEQ ID NO: 173585 - DNA, 17 bp, Arabidopsis thaliana
attcataaaccgtgatt

SEQ ID NO: 173586 - DNA, 17 bp, Arabidopsis thaliana
attcatattgggggctt

SEQ ID NO: 173587 - DNA, 17 bp, Arabidopsis thaliana
attcatccgcttgttca

SEQ ID NO: 173588 - DNA, 17 bp, Arabidopsis thaliana
attcatcgatcacagca

SEQ ID NO: 173589 - DNA, 17 bp, Arabidopsis thaliana
attcatcgtggagattc

SEQ ID NO: 173590 - DNA, 17 bp, Arabidopsis thaliana
attcatgataactcaat

SEQ ID NO: 173591 - DNA, 17 bp, Arabidopsis thaliana
attcatgataactcgac

SEQ ID NO: 173592 - DNA, 17 bp, Arabidopsis thaliana
attcatggcgaagtgga

SEQ ID NO: 173593 - DNA, 17 bp, Arabidopsis thaliana
attcattgtccattgac

SEQ ID NO: 173594 - DNA, 17 bp, Arabidopsis thaliana
attccaaattcgagata

SEQ ID NO: 173595 - DNA, 17 bp, Arabidopsis thaliana
attcccaagtaaataga

SEQ ID NO: 173596 - DNA, 17 bp, Arabidopsis thaliana
attcccaagtaaatagg

SEQ ID NO: 173597 - DNA, 17 bp, Arabidopsis thaliana
attccccaaacgagggc

SEQ ID NO: 173598 - DNA, 17 bp, Arabidopsis thaliana
attcccggctggtgcac

SEQ ID NO: 173599 - DNA, 17 bp, Arabidopsis thaliana
attccggacatcaccca

SEQ ID NO: 173600 - DNA, 17 bp, Arabidopsis thaliana
attccggacatctccca

SEQ ID NO: 173601 - DNA, 17 bp, Arabidopsis thaliana
attccgttaacgaacga

SEQ ID NO: 173602 - DNA, 17 bp, Arabidopsis thaliana
attcctagtaagcgcga

SEQ ID NO: 173603 - DNA, 17 bp, Arabidopsis thaliana
attcctcatgtttctgg

SEQ ID NO: 173604 - DNA, 17 bp, Arabidopsis thaliana
attcctcgtagggtgtt

SEQ ID NO: 173605 - DNA, 17 bp, Arabidopsis thaliana
attccttaaacaactat

SEQ ID NO: 173606 - DNA, 17 bp, Arabidopsis thaliana
attcgaataggcctcta

SEQ ID NO: 173607 - DNA, 17 bp, Arabidopsis thaliana
attcgacaaagtgaagg

SEQ ID NO: 173608 - DNA, 17 bp, Arabidopsis thaliana
attcgaggcctattaaa

SEQ ID NO: 173609 - DNA, 17 bp, Arabidopsis thaliana
attcgattccggcaggt

SEQ ID NO: 173610 - DNA, 17 bp, Arabidopsis thaliana
attcgatttattgtgga

SEQ ID NO: 173611 - DNA, 17 bp, Arabidopsis thaliana
attcggggcgtggaccg

SEQ ID NO: 173612 - DNA, 17 bp, Arabidopsis thaliana
attcgtacccgggctca

SEQ ID NO: 173613 - DNA, 17 bp, Arabidopsis thaliana
attcgtatccttacaat

SEQ ID NO: 173614 - DNA, 17 bp, Arabidopsis thaliana
attctaagtccaacata

SEQ ID NO: 173615 - DNA, 17 bp, Arabidopsis thaliana
attctaagttcaacata

SEQ ID NO: 173616 - DNA, 17 bp, Arabidopsis thaliana
attctacaattgggata

SEQ ID NO: 173617 - DNA, 17 bp, Arabidopsis thaliana
attctatgggtggtggt

SEQ ID NO: 173618 - DNA, 17 bp, Arabidopsis thaliana
attctcatgtgcgaagt

SEQ ID NO: 173619 - DNA, 17 bp, Arabidopsis thaliana
attctcccgatagcact

SEQ ID NO: 173620 - DNA, 17 bp, Arabidopsis thaliana
attctcccgcctagccg

SEQ ID NO: 173621 - DNA, 17 bp, Arabidopsis thaliana
attctcgcttggggtgc

SEQ ID NO: 173622 - DNA, 17 bp, Arabidopsis thaliana
attctctgtgtaagcga

SEQ ID NO: 173623 - DNA, 17 bp, Arabidopsis thaliana
attctctttttcttgac

SEQ ID NO: 173624 - DNA, 17 bp, Arabidopsis thaliana
attctgactcctgagat

SEQ ID NO: 173625 - DNA, 17 bp, Arabidopsis thaliana
attctggccatggtcag

SEQ ID NO: 173626 - DNA, 17 bp, Arabidopsis thaliana
attctggcggttgaggg

SEQ ID NO: 173627 - DNA, 17 bp, Arabidopsis thaliana
attcttactagggtttc

SEQ ID NO: 173628 - DNA, 17 bp, Arabidopsis thaliana
attcttccccaacggca

SEQ ID NO: 173629 - DNA, 17 bp, Arabidopsis thaliana
attcttgtgataggtcc

SEQ ID NO: 173630 - DNA, 17 bp, Arabidopsis thaliana
attgaaaaatcttttgt

SEQ ID NO: 173631 - DNA, 17 bp, Arabidopsis thaliana
attgaaagactattcaa

SEQ ID NO: 173632 - DNA, 17 bp, Arabidopsis thaliana
attgaacaaagttagat

SEQ ID NO: 173633 - DNA, 17 bp, Arabidopsis thaliana
attgaacaagctaaaca

SEQ ID NO: 173634 - DNA, 17 bp, Arabidopsis thaliana
attgaagacagtaaagt

SEQ ID NO: 173635 - DNA, 17 bp, Arabidopsis thaliana
attgaaggtcgcgattc

SEQ ID NO: 173636 - DNA, 17 bp, Arabidopsis thaliana
attgaatgactattcaa

SEQ ID NO: 173637 - DNA, 17 bp, Arabidopsis thaliana
attgaatgactattcat

SEQ ID NO: 173638 - DNA, 17 bp, Arabidopsis thaliana
attgacgagagaactaa

SEQ ID NO: 173639 - DNA, 17 bp, Arabidopsis thaliana
attgacgagagaactta

SEQ ID NO: 173640 - DNA, 17 bp, Arabidopsis thaliana
attgacgagagaacttg

SEQ ID NO: 173641 - DNA, 17 bp, Arabidopsis thaliana
attgacggaagggcacc

SEQ ID NO: 173642 - DNA, 17 bp, Arabidopsis thaliana
attgactctcgactcat

SEQ ID NO: 173643 - DNA, 17 bp, Arabidopsis thaliana
attgagaaatctcgaag

SEQ ID NO: 173644 - DNA, 17 bp, Arabidopsis thaliana
attgagacctatttact

SEQ ID NO: 173645 - DNA, 17 bp, Arabidopsis thaliana
attgagccaaggatgac

SEQ ID NO: 173646 - DNA, 17 bp, Arabidopsis thaliana
attgaggaagatccaga

SEQ ID NO: 173647 - DNA, 17 bp, Arabidopsis thaliana
attgataggatggtaga

SEQ ID NO: 173648 - DNA, 17 bp, Arabidopsis thaliana
attgatgcatttgtgaa

SEQ ID NO: 173649 - DNA, 17 bp, Arabidopsis thaliana
attgatgtgcggccaac

SEQ ID NO: 173650 - DNA, 17 bp, Arabidopsis thaliana
attgattatttgatcgt

SEQ ID NO: 173651 - DNA, 17 bp, Arabidopsis thaliana
attgattcccaagtaaa

SEQ ID NO: 173652 - DNA, 17 bp, Arabidopsis thaliana
attgatttttggattta

SEQ ID NO: 173653 - DNA, 17 bp, Arabidopsis thaliana
attgatttttggatttc

SEQ ID NO: 173654 - DNA, 17 bp, Arabidopsis thaliana
attgcagaatcccgtga

SEQ ID NO: 173655 - DNA, 17 bp, Arabidopsis thaliana
attgccaacgagtgcca

SEQ ID NO: 173656 - DNA, 17 bp, Arabidopsis thaliana
attgccgaccctcagta

SEQ ID NO: 173657 - DNA, 17 bp, Arabidopsis thaliana
attgccgtgatcgatga

SEQ ID NO: 173658 - DNA, 17 bp, Arabidopsis thaliana
attgccgttgtcaagaa

SEQ ID NO: 173659 - DNA, 17 bp, Arabidopsis thaliana
attgcctgactgggagc

SEQ ID NO: 173660 - DNA, 17 bp, Arabidopsis thaliana
attgcgatggcagccac

SEQ ID NO: 173661 - DNA, 17 bp, Arabidopsis thaliana
attgcgatggtccctgc

SEQ ID NO: 173662 - DNA, 17 bp, Arabidopsis thaliana
attgcggttgtgcaaaa

SEQ ID NO: 173663 - DNA, 17 bp, Arabidopsis thaliana
attgcggtttgttgtgc

SEQ ID NO: 173664 - DNA, 17 bp, Arabidopsis thaliana
attgcgtattcgggaga

SEQ ID NO: 173665 - DNA, 17 bp, Arabidopsis thaliana
attgcgttagcatccga

SEQ ID NO: 173666 - DNA, 17 bp, Arabidopsis thaliana
attgctatgccttgttc

SEQ ID NO: 173667 - DNA, 17 bp, Arabidopsis thaliana
attgctgagccagaaca

SEQ ID NO: 173668 - DNA, 17 bp, Arabidopsis thaliana
attgctgcttctacgac

SEQ ID NO: 173669 - DNA, 17 bp, Arabidopsis thaliana
attgcttgatgacactt

SEQ ID NO: 173670 - DNA, 17 bp, Arabidopsis thaliana
attgcttgcttagacgt

SEQ ID NO: 173671 - DNA, 17 bp, Arabidopsis thaliana
attggaaaacatgatta

SEQ ID NO: 173672 - DNA, 17 bp, Arabidopsis thaliana
attggaacagcttgtgt

SEQ ID NO: 173673 - DNA, 17 bp, Arabidopsis thaliana
attggaacagtttgtgt

SEQ ID NO: 173674 - DNA, 17 bp, Arabidopsis thaliana
attggaataccctggat

SEQ ID NO: 173675 - DNA, 17 bp, Arabidopsis thaliana
attggaatcaggctgtg

SEQ ID NO: 173676 - DNA, 17 bp, Arabidopsis thaliana
attggaccagtactagg

SEQ ID NO: 173677 - DNA, 17 bp, Arabidopsis thaliana
attggaccttctttgac

SEQ ID NO: 173678 - DNA, 17 bp, Arabidopsis thaliana
attggactgaagggagc

SEQ ID NO: 173679 - DNA, 17 bp, Arabidopsis thaliana
attggagggcaagtctg

SEQ ID NO: 173680 - DNA, 17 bp, Arabidopsis thaliana
attggatctaagtggat

SEQ ID NO: 173681 - DNA, 17 bp, Arabidopsis thaliana
attggatcttaggaaat

SEQ ID NO: 173682 - DNA, 17 bp, Arabidopsis thaliana
attggatgaatctggtc

SEQ ID NO: 173683 - DNA, 17 bp, Arabidopsis thaliana
attggatgatcgggccg

SEQ ID NO: 173684 - DNA, 17 bp, Arabidopsis thaliana
attggcgggatccctcg

SEQ ID NO: 173685 - DNA, 17 bp, Arabidopsis thaliana
attggctccgaaccttc

SEQ ID NO: 173686 - DNA, 17 bp, Arabidopsis thaliana
attggcttctaccgcaa

SEQ ID NO: 173687 - DNA, 17 bp, Arabidopsis thaliana
attgggtattaaacttc

SEQ ID NO: 173688 - DNA, 17 bp, Arabidopsis thaliana
attggtggtatcttaac

SEQ ID NO: 173689 - DNA, 17 bp, Arabidopsis thaliana
attggtttgttgtttct

SEQ ID NO: 173690 - DNA, 17 bp, Arabidopsis thaliana
attgtaactcgctgctc

SEQ ID NO: 173691 - DNA, 17 bp, Arabidopsis thaliana
attgtaagtcactacgt

SEQ ID NO: 173692 - DNA, 17 bp, Arabidopsis thaliana
attgtacagatgtaagt

SEQ ID NO: 173693 - DNA, 17 bp, Arabidopsis thaliana
attgtagtacactcaca

SEQ ID NO: 173694 - DNA, 17 bp, Arabidopsis thaliana
attgtagtctgtagcca

SEQ ID NO: 173695 - DNA, 17 bp, Arabidopsis thaliana
attgtatcatcaactgt

SEQ ID NO: 173696 - DNA, 17 bp, Arabidopsis thaliana
attgtatcattaactaa

SEQ ID NO: 173697 - DNA, 17 bp, Arabidopsis thaliana
attgtatcattaactat

SEQ ID NO: 173698 - DNA, 17 bp, Arabidopsis thaliana
attgtcaacgtctacaa

SEQ ID NO: 173699 - DNA, 17 bp, Arabidopsis thaliana
attgtcactacctcccc

SEQ ID NO: 173700 - DNA, 17 bp, Arabidopsis thaliana
attgtcagatctaattc

SEQ ID NO: 173701 - DNA, 17 bp, Arabidopsis thaliana
attgtcaggtctaatta

SEQ ID NO: 173702 - DNA, 17 bp, Arabidopsis thaliana
attgtcaggtggggagt

SEQ ID NO: 173703 - DNA, 17 bp, Arabidopsis thaliana
attgtccattgacgaga

SEQ ID NO: 173704 - DNA, 17 bp, Arabidopsis thaliana
attgtccctaatcatgt

SEQ ID NO: 173705 - DNA, 17 bp, Arabidopsis thaliana
attgtccctctaagaaa

SEQ ID NO: 173706 - DNA, 17 bp, Arabidopsis thaliana
attgtcgatacctgatc

SEQ ID NO: 173707 - DNA, 17 bp, Arabidopsis thaliana
attgtcggcacttgaga

SEQ ID NO: 173708 - DNA, 17 bp, Arabidopsis thaliana
attgtcgggagggaagc

SEQ ID NO: 173709 - DNA, 17 bp, Arabidopsis thaliana
attgtctaggtaagaga

SEQ ID NO: 173710 - DNA, 17 bp, Arabidopsis thaliana
attgtcttggccggagt

SEQ ID NO: 173711 - DNA, 17 bp, Arabidopsis thaliana
attgtgaagatccgttc

SEQ ID NO: 173712 - DNA, 17 bp, Arabidopsis thaliana
attgtgaatccaccatg

SEQ ID NO: 173713 - DNA, 17 bp, Arabidopsis thaliana
attgtggttcgttctct

SEQ ID NO: 173714 - DNA, 17 bp, Arabidopsis thaliana
attgtgtgtctgagaat

SEQ ID NO: 173715 - DNA, 17 bp, Arabidopsis thaliana
attgttagacgcagcgt

SEQ ID NO: 173716 - DNA, 17 bp, Arabidopsis thaliana
attgttcgggagacatg

SEQ ID NO: 173717 - DNA, 17 bp, Arabidopsis thaliana
attgttggactaccatc

SEQ ID NO: 173718 - DNA, 17 bp, Arabidopsis thaliana
attgttggtcttcaacg

SEQ ID NO: 173719 - DNA, 17 bp, Arabidopsis thaliana
attgttgtgaccaacaa

SEQ ID NO: 173720 - DNA, 17 bp, Arabidopsis thaliana
attgttgtgaccaacat

SEQ ID NO: 173721 - DNA, 17 bp, Arabidopsis thaliana
attgtttgagatctgcg

SEQ ID NO: 173722 - DNA, 17 bp, Arabidopsis thaliana
attgtttgtcgtttatg

SEQ ID NO: 173723 - DNA, 17 bp, Arabidopsis thaliana
atttaagctaacggacc

SEQ ID NO: 173724 - DNA, 17 bp, Arabidopsis thaliana
atttaagtcgtctgcaa

SEQ ID NO: 173725 - DNA, 17 bp, Arabidopsis thaliana
atttacaagtcccttct

SEQ ID NO: 173726 - DNA, 17 bp, Arabidopsis thaliana
atttacagtgatttgat

SEQ ID NO: 173727 - DNA, 17 bp, Arabidopsis thaliana
atttacatcctcttctg

SEQ ID NO: 173728 - DNA, 17 bp, Arabidopsis thaliana
atttacctaattcgtat

SEQ ID NO: 173729 - DNA, 17 bp, Arabidopsis thaliana
atttacttgggtatcta

SEQ ID NO: 173730 - DNA, 17 bp, Arabidopsis thaliana
atttatcatatcttcac

SEQ ID NO: 173731 - DNA, 17 bp, Arabidopsis thaliana
atttatccaaaatcatc

SEQ ID NO: 173732 - DNA, 17 bp, Arabidopsis thaliana
atttattgggtcgttcg

SEQ ID NO: 173733 - DNA, 17 bp, Arabidopsis thaliana
atttcaaaattgacccg

SEQ ID NO: 173734 - DNA, 17 bp, Arabidopsis thaliana
atttcaaagtcgaaggc

SEQ ID NO: 173735 - DNA, 17 bp, Arabidopsis thaliana
atttcagtgaataagtc

SEQ ID NO: 173736 - DNA, 17 bp, Arabidopsis thaliana
atttcatcgtgatgggg

SEQ ID NO: 173737 - DNA, 17 bp, Arabidopsis thaliana
atttccaaacccttgca

SEQ ID NO: 173738 - DNA, 17 bp, Arabidopsis thaliana
atttccaagcagagcga

SEQ ID NO: 173739 - DNA, 17 bp, Arabidopsis thaliana
atttccaatgtcttttc

SEQ ID NO: 173740 - DNA, 17 bp, Arabidopsis thaliana
atttcctaagatccaaa

SEQ ID NO: 173741 - DNA, 17 bp, Arabidopsis thaliana
atttcctaagatccaat

SEQ ID NO: 173742 - DNA, 17 bp, Arabidopsis thaliana
atttcctaagatccacc

SEQ ID NO: 173743 - DNA, 17 bp, Arabidopsis thaliana
atttcctatgaagtaac

SEQ ID NO: 173744 - DNA, 17 bp, Arabidopsis thaliana
atttcgatagttggtga

SEQ ID NO: 173745 - DNA, 17 bp, Arabidopsis thaliana
atttcgatcctattgtg

SEQ ID NO: 173746 - DNA, 17 bp, Arabidopsis thaliana
atttcgatttgactata

SEQ ID NO: 173747 - DNA, 17 bp, Arabidopsis thaliana
atttctaaaccgaccga

SEQ ID NO: 173748 - DNA, 17 bp, Arabidopsis thaliana
atttctaagcttcttcc

SEQ ID NO: 173749 - DNA, 17 bp, Arabidopsis thaliana
atttctaggggaccgtg

SEQ ID NO: 173750 - DNA, 17 bp, Arabidopsis thaliana
atttctagtgggtcgta

SEQ ID NO: 173751 - DNA, 17 bp, Arabidopsis thaliana
atttctagttcgtcgat

SEQ ID NO: 173752 - DNA, 17 bp, Arabidopsis thaliana
atttctagttcgtcggt

SEQ ID NO: 173753 - DNA, 17 bp, Arabidopsis thaliana
atttctccacacgttca

SEQ ID NO: 173754 - DNA, 17 bp, Arabidopsis thaliana
atttctcggaacgcccc

SEQ ID NO: 173755 - DNA, 17 bp, Arabidopsis thaliana
atttctctacgctatgt

SEQ ID NO: 173756 - DNA, 17 bp, Arabidopsis thaliana
atttctctccgatggaa

SEQ ID NO: 173757 - DNA, 17 bp, Arabidopsis thaliana
atttctgacacatgttg

SEQ ID NO: 173758 - DNA, 17 bp, Arabidopsis thaliana
atttctgcaggatatcc

SEQ ID NO: 173759 - DNA, 17 bp, Arabidopsis thaliana
atttctgcccagtgctc

SEQ ID NO: 173760 - DNA, 17 bp, Arabidopsis thaliana
atttcttcttggataaa

SEQ ID NO: 173761 - DNA, 17 bp, Arabidopsis thaliana
atttctttgctgaactg

SEQ ID NO: 173762 - DNA, 17 bp, Arabidopsis thaliana
atttgaatacattattg

SEQ ID NO: 173763 - DNA, 17 bp, Arabidopsis thaliana
atttgagctacatcccc

SEQ ID NO: 173764 - DNA, 17 bp, Arabidopsis thaliana
atttgatgtggtaatct

SEQ ID NO: 173765 - DNA, 17 bp, Arabidopsis thaliana
atttgcacaggtgagaa

SEQ ID NO: 173766 - DNA, 17 bp, Arabidopsis thaliana
atttgccaaggatgttt

SEQ ID NO: 173767 - DNA, 17 bp, Arabidopsis thaliana
atttgccagtatgttat

SEQ ID NO: 173768 - DNA, 17 bp, Arabidopsis thaliana
atttggatccgatcgtg

SEQ ID NO: 173769 - DNA, 17 bp, Arabidopsis thaliana
atttggatgctgctcag

SEQ ID NO: 173770 - DNA, 17 bp, Arabidopsis thaliana
atttggatgctgcttag

SEQ ID NO: 173771 - DNA, 17 bp, Arabidopsis thaliana
atttggctagccatcga

SEQ ID NO: 173772 - DNA, 17 bp, Arabidopsis thaliana
atttggctttaaatctg

SEQ ID NO: 173773 - DNA, 17 bp, Arabidopsis thaliana
atttgggatgtgctaaa

SEQ ID NO: 173774 - DNA, 17 bp, Arabidopsis thaliana
atttgggcacaacggtg

SEQ ID NO: 173775 - DNA, 17 bp, Arabidopsis thaliana
atttgggtggcgaagcg

SEQ ID NO: 173776 - DNA, 17 bp, Arabidopsis thaliana
atttgtatcgtgacatg

SEQ ID NO: 173777 - DNA, 17 bp, Arabidopsis thaliana
atttgtatgcttcaata

SEQ ID NO: 173778 - DNA, 17 bp, Arabidopsis thaliana
atttgtcaagttgcaga

SEQ ID NO: 173779 - DNA, 17 bp, Arabidopsis thaliana
atttgtctggttaatta

SEQ ID NO: 173780 - DNA, 17 bp, Arabidopsis thaliana
atttgtctggttaattc

SEQ ID NO: 173781 - DNA, 17 bp, Arabidopsis thaliana
atttgtgaactagaggt

SEQ ID NO: 173782 - DNA, 17 bp, Arabidopsis thaliana
atttgtgcgcttgggag

SEQ ID NO: 173783 - DNA, 17 bp, Arabidopsis thaliana
atttgtgtctgagatat

SEQ ID NO: 173784 - DNA, 17 bp, Arabidopsis thaliana
atttgttactaatttgg

SEQ ID NO: 173785 - DNA, 17 bp, Arabidopsis thaliana
atttgtttttggaaagc

SEQ ID NO: 173786 - DNA, 17 bp, Arabidopsis thaliana
attttacggtgggagat

SEQ ID NO: 173787 - DNA, 17 bp, Arabidopsis thaliana
attttcagatccatttc

SEQ ID NO: 173788 - DNA, 17 bp, Arabidopsis thaliana
attttccacagctttct

SEQ ID NO: 173789 - DNA, 17 bp, Arabidopsis thaliana
attttcccttgttccat

SEQ ID NO: 173790 - DNA, 17 bp, Arabidopsis thaliana
attttccttgatccatc

SEQ ID NO: 173791 - DNA, 17 bp, Arabidopsis thaliana
attttcgacggcattaa

SEQ ID NO: 173792 - DNA, 17 bp, Arabidopsis thaliana
attttcgacggcattac

SEQ ID NO: 173793 - DNA, 17 bp, Arabidopsis thaliana
attttcgcaggctcgaa

SEQ ID NO: 173794 - DNA, 17 bp, Arabidopsis thaliana
attttcgtgttggttca

SEQ ID NO: 173795 - DNA, 17 bp, Arabidopsis thaliana
attttctaagacccacc

SEQ ID NO: 173796 - DNA, 17 bp, Arabidopsis thaliana
attttctaagatccaac

SEQ ID NO: 173797 - DNA, 17 bp, Arabidopsis thaliana
attttctaagatccaca

SEQ ID NO: 173798 - DNA, 17 bp, Arabidopsis thaliana
attttctaagatccacc

SEQ ID NO: 173799 - DNA, 17 bp, Arabidopsis thaliana
attttctaagatccact

SEQ ID NO: 173800 - DNA, 17 bp, Arabidopsis thaliana
attttctaagatccgcc

SEQ ID NO: 173801 - DNA, 17 bp, Arabidopsis thaliana
attttctaagatcttaa

SEQ ID NO: 173802 - DNA, 17 bp, Arabidopsis thaliana
attttctaagatcttat

SEQ ID NO: 173803 - DNA, 17 bp, Arabidopsis thaliana
attttctaagatcttct

SEQ ID NO: 173804 - DNA, 17 bp, Arabidopsis thaliana
attttctaagattcacc

SEQ ID NO: 173805 - DNA, 17 bp, Arabidopsis thaliana
attttctaggatccacc

SEQ ID NO: 173806 - DNA, 17 bp, Arabidopsis thaliana
attttctcgttttacag

SEQ ID NO: 173807 - DNA, 17 bp, Arabidopsis thaliana
attttctctacgctatg

SEQ ID NO: 173808 - DNA, 17 bp, Arabidopsis thaliana
attttgaacgcggaagg

SEQ ID NO: 173809 - DNA, 17 bp, Arabidopsis thaliana
attttgggatcatactg

SEQ ID NO: 173810 - DNA, 17 bp, Arabidopsis thaliana
attttggggattttgtt

SEQ ID NO: 173811 - DNA, 17 bp, Arabidopsis thaliana
attttgtaatttcaaaa

SEQ ID NO: 173812 - DNA, 17 bp, Arabidopsis thaliana
attttgttattcggatg

SEQ ID NO: 173813 - DNA, 17 bp, Arabidopsis thaliana
attttgttatttggatg

SEQ ID NO: 173814 - DNA, 17 bp, Arabidopsis thaliana
attttgttatttggttg

SEQ ID NO: 173815 - DNA, 17 bp, Arabidopsis thaliana
attttgttccttcttct

SEQ ID NO: 173816 - DNA, 17 bp, Arabidopsis thaliana
attttgttttcggggtt

SEQ ID NO: 173817 - DNA, 17 bp, Arabidopsis thaliana
atttttaaattgacagg

SEQ ID NO: 173818 - DNA, 17 bp, Arabidopsis thaliana
atttttacgcatgtacc

SEQ ID NO: 173819 - DNA, 17 bp, Arabidopsis thaliana
atttttcgccatctatt

SEQ ID NO: 173820 - DNA, 17 bp, Arabidopsis thaliana
atttttcgtgatttctc

SEQ ID NO: 173821 - DNA, 17 bp, Arabidopsis thaliana
atttttctctttttttt

SEQ ID NO: 173822 - DNA, 17 bp, Arabidopsis thaliana
atttttgcagcgatttt

SEQ ID NO: 173823 - DNA, 17 bp, Arabidopsis thaliana
atttttggggacactga

SEQ ID NO: 173824 - DNA, 17 bp, Arabidopsis thaliana
atttttgtcggctttga

SEQ ID NO: 173825 - DNA, 17 bp, Arabidopsis thaliana
atttttgttggaaatgg

SEQ ID NO: 173826 - DNA, 17 bp, Arabidopsis thaliana
attttttaagatccacc

SEQ ID NO: 173827 - DNA, 17 bp, Arabidopsis thaliana
attttttacgctatgta

SEQ ID NO: 173828 - DNA, 17 bp, Arabidopsis thaliana
attttttacgctatgtt

SEQ ID NO: 173829 - DNA, 17 bp, Arabidopsis thaliana
attttttgaaagttcag

SEQ ID NO: 173830 - DNA, 17 bp, Arabidopsis thaliana
attttttggacaggtat

SEQ ID NO: 173831 - DNA, 17 bp, Arabidopsis thaliana
attttttgtgttgaatt

SEQ ID NO: 173832 - DNA, 17 bp, Arabidopsis thaliana
atttttttcaaaagaca

SEQ ID NO: 173833 - DNA, 17 bp, Arabidopsis thaliana
atttttttcttaaatga

SEQ ID NO: 173834 - DNA, 17 bp, Arabidopsis thaliana
attttttttggactttt

SEQ ID NO: 173835 - DNA, 17 bp, Arabidopsis thaliana
caaaaaagttcccctat

SEQ ID NO: 173836 - DNA, 17 bp, Arabidopsis thaliana
caaaaacatcatttgta

SEQ ID NO: 173837 - DNA, 17 bp, Arabidopsis thaliana
caaaaaccactgatatg

SEQ ID NO: 173838 - DNA, 17 bp, Arabidopsis thaliana
caaaaattgtgtagact

SEQ ID NO: 173839 - DNA, 17 bp, Arabidopsis thaliana
caaaacactctccaagg

SEQ ID NO: 173840 - DNA, 17 bp, Arabidopsis thaliana
caaaacagatgctgcaa

SEQ ID NO: 173841 - DNA, 17 bp, Arabidopsis thaliana
caaaacccattgatcag

SEQ ID NO: 173842 - DNA, 17 bp, Arabidopsis thaliana
caaaaccctattgattc

SEQ ID NO: 173843 - DNA, 17 bp, Arabidopsis thaliana
caaaaccgcagctacat

SEQ ID NO: 173844 - DNA, 17 bp, Arabidopsis thaliana
caaaacgctaccgagga

SEQ ID NO: 173845 - DNA, 17 bp, Arabidopsis thaliana
caaaactggttcggtcg

SEQ ID NO: 173846 - DNA, 17 bp, Arabidopsis thaliana
caaaactgttcaccatt

SEQ ID NO: 173847 - DNA, 17 bp, Arabidopsis thaliana
caaaagagtaagatgga

SEQ ID NO: 173848 - DNA, 17 bp, Arabidopsis thaliana
caaaagatctggtgatg

SEQ ID NO: 173849 - DNA, 17 bp, Arabidopsis thaliana
caaaagcgaaggcagct

SEQ ID NO: 173850 - DNA, 17 bp, Arabidopsis thaliana
caaaagtgggattaaat

SEQ ID NO: 173851 - DNA, 17 bp, Arabidopsis thaliana
caaaataaggaatgctt

SEQ ID NO: 173852 - DNA, 17 bp, Arabidopsis thaliana
caaaatacacaagttca

SEQ ID NO: 173853 - DNA, 17 bp, Arabidopsis thaliana
caaaatacggggatgac

SEQ ID NO: 173854 - DNA, 17 bp, Arabidopsis thaliana
caaaatggatccgtaac

SEQ ID NO: 173855 - DNA, 17 bp, Arabidopsis thaliana
caaaattgacccgaatt

SEQ ID NO: 173856 - DNA, 17 bp, Arabidopsis thaliana
caaaatttctaaacaaa

SEQ ID NO: 173857 - DNA, 17 bp, Arabidopsis thaliana
caaaatttctaaaccga

SEQ ID NO: 173858 - DNA, 17 bp, Arabidopsis thaliana
caaacaaacggcacttt

SEQ ID NO: 173859 - DNA, 17 bp, Arabidopsis thaliana
caaacacttggtatggg

SEQ ID NO: 173860 - DNA, 17 bp, Arabidopsis thaliana
caaacatgtgcttggcc

SEQ ID NO: 173861 - DNA, 17 bp, Arabidopsis thaliana
caaaccgggcactacgg

SEQ ID NO: 173862 - DNA, 17 bp, Arabidopsis thaliana
caaaccggtgatcactg

SEQ ID NO: 173863 - DNA, 17 bp, Arabidopsis thaliana
caaacgacgctgcagcc

SEQ ID NO: 173864 - DNA, 17 bp, Arabidopsis thaliana
caaacgacgctgcaggc

SEQ ID NO: 173865 - DNA, 17 bp, Arabidopsis thaliana
caaacgatcatgttctc

SEQ ID NO: 173866 - DNA, 17 bp, Arabidopsis thaliana
caaacgggagggttatt

SEQ ID NO: 173867 - DNA, 17 bp, Arabidopsis thaliana
caaacggtaggcgtacg

SEQ ID NO: 173868 - DNA, 17 bp, Arabidopsis thaliana
caaactcctccgtttgt

SEQ ID NO: 173869 - DNA, 17 bp, Arabidopsis thaliana
caaactgccatcccgac

SEQ ID NO: 173870 - DNA, 17 bp, Arabidopsis thaliana
caaactggtaaacaaag

SEQ ID NO: 173871 - DNA, 17 bp, Arabidopsis thaliana
caaacttgatcgctcaa

SEQ ID NO: 173872 - DNA, 17 bp, Arabidopsis thaliana
caaactttcaacaacgg

SEQ ID NO: 173873 - DNA, 17 bp, Arabidopsis thaliana
caaagaaaacggtgttg

SEQ ID NO: 173874 - DNA, 17 bp, Arabidopsis thaliana
caaagaaggtgatagcc

SEQ ID NO: 173875 - DNA, 17 bp, Arabidopsis thaliana
caaagactcagtattga

SEQ ID NO: 173876 - DNA, 17 bp, Arabidopsis thaliana
caaagaggaagatagga

SEQ ID NO: 173877 - DNA, 17 bp, Arabidopsis thaliana
caaagatctgcatacca

SEQ ID NO: 173878 - DNA, 17 bp, Arabidopsis thaliana
caaagattaagccatga

SEQ ID NO: 173879 - DNA, 17 bp, Arabidopsis thaliana
caaagattaagccatgc

SEQ ID NO: 173880 - DNA, 17 bp, Arabidopsis thaliana
caaagattacccgggcc

SEQ ID NO: 173881 - DNA, 17 bp, Arabidopsis thaliana
caaagattatcaagatc

SEQ ID NO: 173882 - DNA, 17 bp, Arabidopsis thaliana
caaagcacctcatatct

SEQ ID NO: 173883 - DNA, 17 bp, Arabidopsis thaliana
caaagcattgcgatggt

SEQ ID NO: 173884 - DNA, 17 bp, Arabidopsis thaliana
caaagccaaatcaatat

SEQ ID NO: 173885 - DNA, 17 bp, Arabidopsis thaliana
caaagctatcggattat

SEQ ID NO: 173886 - DNA, 17 bp, Arabidopsis thaliana
caaaggatgaaactcaa

SEQ ID NO: 173887 - DNA, 17 bp, Arabidopsis thaliana
caaaggattctacccgc

SEQ ID NO: 173888 - DNA, 17 bp, Arabidopsis thaliana
caaaggccattgaccaa

SEQ ID NO: 173889 - DNA, 17 bp, Arabidopsis thaliana
caaaggccattgaccag

SEQ ID NO: 173890 - DNA, 17 bp, Arabidopsis thaliana
caaaggcggaccggccg

SEQ ID NO: 173891 - DNA, 17 bp, Arabidopsis thaliana
caaaggcggaggaggga

SEQ ID NO: 173892 - DNA, 17 bp, Arabidopsis thaliana
caaaggcggaggagttg

SEQ ID NO: 173893 - DNA, 17 bp, Arabidopsis thaliana
caaaggctcatggttct

SEQ ID NO: 173894 - DNA, 17 bp, Arabidopsis thaliana
caaagggtgttggtcga

SEQ ID NO: 173895 - DNA, 17 bp, Arabidopsis thaliana
caaaggttgtcaaccag

SEQ ID NO: 173896 - DNA, 17 bp, Arabidopsis thaliana
caaagtaacagcgccgg

SEQ ID NO: 173897 - DNA, 17 bp, Arabidopsis thaliana
caaagtaatttgaccaa

SEQ ID NO: 173898 - DNA, 17 bp, Arabidopsis thaliana
caaatagctaccaacaa

SEQ ID NO: 173899 - DNA, 17 bp, Arabidopsis thaliana
caaatagctaccaacag

SEQ ID NO: 173900 - DNA, 17 bp, Arabidopsis thaliana
caaatattgtccctcta

SEQ ID NO: 173901 - DNA, 17 bp, Arabidopsis thaliana
caaatccattggctata

SEQ ID NO: 173902 - DNA, 17 bp, Arabidopsis thaliana
caaatccgataaggggc

SEQ ID NO: 173903 - DNA, 17 bp, Arabidopsis thaliana
caaatccgggtgccgcc

SEQ ID NO: 173904 - DNA, 17 bp, Arabidopsis thaliana
caaatcctacagagcgt

SEQ ID NO: 173905 - DNA, 17 bp, Arabidopsis thaliana
caaatcctcggacccgg

SEQ ID NO: 173906 - DNA, 17 bp, Arabidopsis thaliana
caaatcgttcgtctgac

SEQ ID NO: 173907 - DNA, 17 bp, Arabidopsis thaliana
caaatctcactaattac

SEQ ID NO: 173908 - DNA, 17 bp, Arabidopsis thaliana
caaatctttcacggaag

SEQ ID NO: 173909 - DNA, 17 bp, Arabidopsis thaliana
caaatggctgggttttg

SEQ ID NO: 173910 - DNA, 17 bp, Arabidopsis thaliana
caaatgggaaactaccc

SEQ ID NO: 173911 - DNA, 17 bp, Arabidopsis thaliana
caaatgtagacaaagca

SEQ ID NO: 173912 - DNA, 17 bp, Arabidopsis thaliana
caaatgtagacaaagcc

SEQ ID NO: 173913 - DNA, 17 bp, Arabidopsis thaliana
caaattcaagccgttgc

SEQ ID NO: 173914 - DNA, 17 bp, Arabidopsis thaliana
caaattcatcccagatg

SEQ ID NO: 173915 - DNA, 17 bp, Arabidopsis thaliana
caaattgtgttacttag

SEQ ID NO: 173916 - DNA, 17 bp, Arabidopsis thaliana
caacaaacttctccgcc

SEQ ID NO: 173917 - DNA, 17 bp, Arabidopsis thaliana
caacaagtgtgatgaga

SEQ ID NO: 173918 - DNA, 17 bp, Arabidopsis thaliana
caacaataggctatatg

SEQ ID NO: 173919 - DNA, 17 bp, Arabidopsis thaliana
caacaattttttttgga

SEQ ID NO: 173920 - DNA, 17 bp, Arabidopsis thaliana
caacaatttttttttgg

SEQ ID NO: 173921 - DNA, 17 bp, Arabidopsis thaliana
caacaattttttttttt

SEQ ID NO: 173922 - DNA, 17 bp, Arabidopsis thaliana
caacacacggtgggagc

SEQ ID NO: 173923 - DNA, 17 bp, Arabidopsis thaliana
caacacggggaaactta

SEQ ID NO: 173924 - DNA, 17 bp, Arabidopsis thaliana
caacacgtcgcgaggaa

SEQ ID NO: 173925 - DNA, 17 bp, Arabidopsis thaliana
caacacgtcgcgaggag

SEQ ID NO: 173926 - DNA, 17 bp, Arabidopsis thaliana
caacagaaccggcccga

SEQ ID NO: 173927 - DNA, 17 bp, Arabidopsis thaliana
caacagaaccggcccgt

SEQ ID NO: 173928 - DNA, 17 bp, Arabidopsis thaliana
caacagctcgtttacag

SEQ ID NO: 173929 - DNA, 17 bp, Arabidopsis thaliana
caacagggtcttcttcc

SEQ ID NO: 173930 - DNA, 17 bp, Arabidopsis thaliana
caacaggtggagttgcg

SEQ ID NO: 173931 - DNA, 17 bp, Arabidopsis thaliana
caacaggtttcttcatc

SEQ ID NO: 173932 - DNA, 17 bp, Arabidopsis thaliana
caacagtaggctatatg

SEQ ID NO: 173933 - DNA, 17 bp, Arabidopsis thaliana
caacagtttgcgcagct

SEQ ID NO: 173934 - DNA, 17 bp, Arabidopsis thaliana
caacatagcgcattcta

SEQ ID NO: 173935 - DNA, 17 bp, Arabidopsis thaliana
caacatagcgtattcta

SEQ ID NO: 173936 - DNA, 17 bp, Arabidopsis thaliana
caacatagcgttcgaaa

SEQ ID NO: 173937 - DNA, 17 bp, Arabidopsis thaliana
caacatatcgacgaact

SEQ ID NO: 173938 - DNA, 17 bp, Arabidopsis thaliana
caacatcagtaaccgta

SEQ ID NO: 173939 - DNA, 17 bp, Arabidopsis thaliana
caacatcatatccggaa

SEQ ID NO: 173940 - DNA, 17 bp, Arabidopsis thaliana
caacatctcagatttgc

SEQ ID NO: 173941 - DNA, 17 bp, Arabidopsis thaliana
caacatcttcaagattc

SEQ ID NO: 173942 - DNA, 17 bp, Arabidopsis thaliana
caaccaaggatgacttg

SEQ ID NO: 173943 - DNA, 17 bp, Arabidopsis thaliana
caaccacgagatccctc

SEQ ID NO: 173944 - DNA, 17 bp, Arabidopsis thaliana
caaccacgagatcctcc

SEQ ID NO: 173945 - DNA, 17 bp, Arabidopsis thaliana
caaccacgagatttctc

SEQ ID NO: 173946 - DNA, 17 bp, Arabidopsis thaliana
caaccagatggctttgc

SEQ ID NO: 173947 - DNA, 17 bp, Arabidopsis thaliana
caacccacggtgccacc

SEQ ID NO: 173948 - DNA, 17 bp, Arabidopsis thaliana
caacccacggtgccact

SEQ ID NO: 173949 - DNA, 17 bp, Arabidopsis thaliana
caaccccgtcgctgtca

SEQ ID NO: 173950 - DNA, 17 bp, Arabidopsis thaliana
caacccgatccgaccca

SEQ ID NO: 173951 - DNA, 17 bp, Arabidopsis thaliana
caacccgatccgacccg

SEQ ID NO: 173952 - DNA, 17 bp, Arabidopsis thaliana
caaccctgtatgcaggc

SEQ ID NO: 173953 - DNA, 17 bp, Arabidopsis thaliana
caaccgagttttgatcg

SEQ ID NO: 173954 - DNA, 17 bp, Arabidopsis thaliana
caaccgcaggagacaac

SEQ ID NO: 173955 - DNA, 17 bp, Arabidopsis thaliana
caacgcctgtctctgga

SEQ ID NO: 173956 - DNA, 17 bp, Arabidopsis thaliana
caacggaatattgttgt

SEQ ID NO: 173957 - DNA, 17 bp, Arabidopsis thaliana
caacggcaacaattttt

SEQ ID NO: 173958 - DNA, 17 bp, Arabidopsis thaliana
caacgggtcaccaaaga

SEQ ID NO: 173959 - DNA, 17 bp, Arabidopsis thaliana
caacggtagcgcatacg

SEQ ID NO: 173960 - DNA, 17 bp, Arabidopsis thaliana
caacgttaccacggtcg

SEQ ID NO: 173961 - DNA, 17 bp, Arabidopsis thaliana
caacgtttactatactg

SEQ ID NO: 173962 - DNA, 17 bp, Arabidopsis thaliana
caacgtttactatgctg

SEQ ID NO: 173963 - DNA, 17 bp, Arabidopsis thaliana
caacgtttactatgttg

SEQ ID NO: 173964 - DNA, 17 bp, Arabidopsis thaliana
caactaaacggtattcc

SEQ ID NO: 173965 - DNA, 17 bp, Arabidopsis thaliana
caactagctacgtggag

SEQ ID NO: 173966 - DNA, 17 bp, Arabidopsis thaliana
caactatgccgactagg

SEQ ID NO: 173967 - DNA, 17 bp, Arabidopsis thaliana
caactcacctgccgaat

SEQ ID NO: 173968 - DNA, 17 bp, Arabidopsis thaliana
caactccaggattggac

SEQ ID NO: 173969 - DNA, 17 bp, Arabidopsis thaliana
caactctaacttcaacc

SEQ ID NO: 173970 - DNA, 17 bp, Arabidopsis thaliana
caactcttgcgggagaa

SEQ ID NO: 173971 - DNA, 17 bp, Arabidopsis thaliana
caactgagctaaggtcg

SEQ ID NO: 173972 - DNA, 17 bp, Arabidopsis thaliana
caactgcaggaaggaga

SEQ ID NO: 173973 - DNA, 17 bp, Arabidopsis thaliana
caactgcgtggtaactg

SEQ ID NO: 173974 - DNA, 17 bp, Arabidopsis thaliana
caactggattgttcgtg

SEQ ID NO: 173975 - DNA, 17 bp, Arabidopsis thaliana
caacttatcctcggcag

SEQ ID NO: 173976 - DNA, 17 bp, Arabidopsis thaliana
caacttcagaagggttt

SEQ ID NO: 173977 - DNA, 17 bp, Arabidopsis thaliana
caacttcctggcttggt

SEQ ID NO: 173978 - DNA, 17 bp, Arabidopsis thaliana
caacttcgggaactcaa

SEQ ID NO: 173979 - DNA, 17 bp, Arabidopsis thaliana
caacttgaaaatctcat

SEQ ID NO: 173980 - DNA, 17 bp, Arabidopsis thaliana
caacttggaatgggcgg

SEQ ID NO: 173981 - DNA, 17 bp, Arabidopsis thaliana
caacttggaatgggtgg

SEQ ID NO: 173982 - DNA, 17 bp, Arabidopsis thaliana
caacttggattctctaa

SEQ ID NO: 173983 - DNA, 17 bp, Arabidopsis thaliana
caactttcgacggctgg

SEQ ID NO: 173984 - DNA, 17 bp, Arabidopsis thaliana
caactttttgcatcttg

SEQ ID NO: 173985 - DNA, 17 bp, Arabidopsis thaliana
caagaaaaggccttaca

SEQ ID NO: 173986 - DNA, 17 bp, Arabidopsis thaliana
caagaaataaacagcca

SEQ ID NO: 173987 - DNA, 17 bp, Arabidopsis thaliana
caagaacaggacctgtt

SEQ ID NO: 173988 - DNA, 17 bp, Arabidopsis thaliana
caagacaataatcttct

SEQ ID NO: 173989 - DNA, 17 bp, Arabidopsis thaliana
caagacagatgctgcaa

SEQ ID NO: 173990 - DNA, 17 bp, Arabidopsis thaliana
caagacataattggaaa

SEQ ID NO: 173991 - DNA, 17 bp, Arabidopsis thaliana
caagactagagtatcta

SEQ ID NO: 173992 - DNA, 17 bp, Arabidopsis thaliana
caagagactttttttgc

SEQ ID NO: 173993 - DNA, 17 bp, Arabidopsis thaliana
caagagatgctctagtg

SEQ ID NO: 173994 - DNA, 17 bp, Arabidopsis thaliana
caagagccaggcctcga

SEQ ID NO: 173995 - DNA, 17 bp, Arabidopsis thaliana
caagagtagcagccaaa

SEQ ID NO: 173996 - DNA, 17 bp, Arabidopsis thaliana
caagagttgcagccaaa

SEQ ID NO: 173997 - DNA, 17 bp, Arabidopsis thaliana
caagattgggttgcggt

SEQ ID NO: 173998 - DNA, 17 bp, Arabidopsis thaliana
caagattttgttgtata

SEQ ID NO: 173999 - DNA, 17 bp, Arabidopsis thaliana
caagcaagatgtagctg

SEQ ID NO: 174000 - DNA, 17 bp, Arabidopsis thaliana
caagcaatagacccggg

SEQ ID NO: 174001 - DNA, 17 bp, Arabidopsis thaliana
caagcagctgcctgcct

SEQ ID NO: 174002 - DNA, 17 bp, Arabidopsis thaliana
caagcagctgcctggac

SEQ ID NO: 174003 - DNA, 17 bp, Arabidopsis thaliana
caagcatctgtccagga

SEQ ID NO: 174004 - DNA, 17 bp, Arabidopsis thaliana
caagccaagcaataaca

SEQ ID NO: 174005 - DNA, 17 bp, Arabidopsis thaliana
caagcccgttcccttgg

SEQ ID NO: 174006 - DNA, 17 bp, Arabidopsis thaliana
caagcgaatgatgatac

SEQ ID NO: 174007 - DNA, 17 bp, Arabidopsis thaliana
caagcgtcctgttaccg

SEQ ID NO: 174008 - DNA, 17 bp, Arabidopsis thaliana
caagcgtcgttcggacc

SEQ ID NO: 174009 - DNA, 17 bp, Arabidopsis thaliana
caagctaggtcatgctc

SEQ ID NO: 174010 - DNA, 17 bp, Arabidopsis thaliana
caagctatcataatggg

SEQ ID NO: 174011 - DNA, 17 bp, Arabidopsis thaliana
caagctatcttagtggg

SEQ ID NO: 174012 - DNA, 17 bp, Arabidopsis thaliana
caagctgaacttaggga

SEQ ID NO: 174013 - DNA, 17 bp, Arabidopsis thaliana
caagctgagagtgatcc

SEQ ID NO: 174014 - DNA, 17 bp, Arabidopsis thaliana
caagctgctgcgagagg

SEQ ID NO: 174015 - DNA, 17 bp, Arabidopsis thaliana
caaggaagctgattggc

SEQ ID NO: 174016 - DNA, 17 bp, Arabidopsis thaliana
caaggaaggcagcagga

SEQ ID NO: 174017 - DNA, 17 bp, Arabidopsis thaliana
caaggaaggcagcaggc

SEQ ID NO: 174018 - DNA, 17 bp, Arabidopsis thaliana
caaggaagtttgaggca

SEQ ID NO: 174019 - DNA, 17 bp, Arabidopsis thaliana
caaggagccgagtgacg

SEQ ID NO: 174020 - DNA, 17 bp, Arabidopsis thaliana
caaggagcgaagcccga

SEQ ID NO: 174021 - DNA, 17 bp, Arabidopsis thaliana
caaggaggcagcgggga

SEQ ID NO: 174022 - DNA, 17 bp, Arabidopsis thaliana
caaggatgacttgccga

SEQ ID NO: 174023 - DNA, 17 bp, Arabidopsis thaliana
caaggccactctgccac

SEQ ID NO: 174024 - DNA, 17 bp, Arabidopsis thaliana
caaggcggtccgaacga

SEQ ID NO: 174025 - DNA, 17 bp, Arabidopsis thaliana
caaggcgtttgcagaga

SEQ ID NO: 174026 - DNA, 17 bp, Arabidopsis thaliana
caaggctgaaacttaaa

SEQ ID NO: 174027 - DNA, 17 bp, Arabidopsis thaliana
caaggcttattagtttt

SEQ ID NO: 174028 - DNA, 17 bp, Arabidopsis thaliana
caaggcttccagacaaa

SEQ ID NO: 174029 - DNA, 17 bp, Arabidopsis thaliana
caagggaacgggcttgg

SEQ ID NO: 174030 - DNA, 17 bp, Arabidopsis thaliana
caagggacagtctcagg

SEQ ID NO: 174031 - DNA, 17 bp, Arabidopsis thaliana
caaggggaatccgactg

SEQ ID NO: 174032 - DNA, 17 bp, Arabidopsis thaliana
caaggggaatctgactg

SEQ ID NO: 174033 - DNA, 17 bp, Arabidopsis thaliana
caaggtcaacttgcgaa

SEQ ID NO: 174034 - DNA, 17 bp, Arabidopsis thaliana
caaggtcaggggcatta

SEQ ID NO: 174035 - DNA, 17 bp, Arabidopsis thaliana
caaggtcggccagtgag

SEQ ID NO: 174036 - DNA, 17 bp, Arabidopsis thaliana
caaggtcgtggcttcga

SEQ ID NO: 174037 - DNA, 17 bp, Arabidopsis thaliana
caaggttcaagaacgga

SEQ ID NO: 174038 - DNA, 17 bp, Arabidopsis thaliana
caaggtttccgtaggtg

SEQ ID NO: 174039 - DNA, 17 bp, Arabidopsis thaliana
caagtaaataggtctca

SEQ ID NO: 174040 - DNA, 17 bp, Arabidopsis thaliana
caagtaaatgagatttt

SEQ ID NO: 174041 - DNA, 17 bp, Arabidopsis thaliana
caagtcaattcaccaat

SEQ ID NO: 174042 - DNA, 17 bp, Arabidopsis thaliana
caagtccctccttccgc

SEQ ID NO: 174043 - DNA, 17 bp, Arabidopsis thaliana
caagtccctttgatcgg

SEQ ID NO: 174044 - DNA, 17 bp, Arabidopsis thaliana
caagtcctcttcaagaa

SEQ ID NO: 174045 - DNA, 17 bp, Arabidopsis thaliana
caagtcctcttcaagat

SEQ ID NO: 174046 - DNA, 17 bp, Arabidopsis thaliana
caagtcgtctaaagaac

SEQ ID NO: 174047 - DNA, 17 bp, Arabidopsis thaliana
caagtctggtgccagca

SEQ ID NO: 174048 - DNA, 17 bp, Arabidopsis thaliana
caagtgactagccaaag

SEQ ID NO: 174049 - DNA, 17 bp, Arabidopsis thaliana
caagtgcggagcggata

SEQ ID NO: 174050 - DNA, 17 bp, Arabidopsis thaliana
caagtgcttgcagagga

SEQ ID NO: 174051 - DNA, 17 bp, Arabidopsis thaliana
caagttataccgcaaga

SEQ ID NO: 174052 - DNA, 17 bp, Arabidopsis thaliana
caagttcaggaataaat

SEQ ID NO: 174053 - DNA, 17 bp, Arabidopsis thaliana
caagttcaggaatatcc

SEQ ID NO: 174054 - DNA, 17 bp, Arabidopsis thaliana
caagttgaccttggctc

SEQ ID NO: 174055 - DNA, 17 bp, Arabidopsis thaliana
caagttgactctggctc

SEQ ID NO: 174056 - DNA, 17 bp, Arabidopsis thaliana
caagttgtcaccaacat

SEQ ID NO: 174057 - DNA, 17 bp, Arabidopsis thaliana
caagttgtccttggcta

SEQ ID NO: 174058 - DNA, 17 bp, Arabidopsis thaliana
caagttttacgcgatag

SEQ ID NO: 174059 - DNA, 17 bp, Arabidopsis thaliana
caataacaggtctgtga

SEQ ID NO: 174060 - DNA, 17 bp, Arabidopsis thaliana
caataagaatgctagtt

SEQ ID NO: 174061 - DNA, 17 bp, Arabidopsis thaliana
caataatcttctcggct

SEQ ID NO: 174062 - DNA, 17 bp, Arabidopsis thaliana
caataccaaattgccga

SEQ ID NO: 174063 - DNA, 17 bp, Arabidopsis thaliana
caataccaaattgccgt

SEQ ID NO: 174064 - DNA, 17 bp, Arabidopsis thaliana
caatagacccgggttcg

SEQ ID NO: 174065 - DNA, 17 bp, Arabidopsis thaliana
caatagactatatggca

SEQ ID NO: 174066 - DNA, 17 bp, Arabidopsis thaliana
caataggcccggggtct

SEQ ID NO: 174067 - DNA, 17 bp, Arabidopsis thaliana
caataggctatatggca

SEQ ID NO: 174068 - DNA, 17 bp, Arabidopsis thaliana
caatagggttttgggag

SEQ ID NO: 174069 - DNA, 17 bp, Arabidopsis thaliana
caatagtaaccttcgta

SEQ ID NO: 174070 - DNA, 17 bp, Arabidopsis thaliana
caatagtttgtttgatg

SEQ ID NO: 174071 - DNA, 17 bp, Arabidopsis thaliana
caatcctcttcgagaca

SEQ ID NO: 174072 - DNA, 17 bp, Arabidopsis thaliana
caatcctgacacgggga

SEQ ID NO: 174073 - DNA, 17 bp, Arabidopsis thaliana
caatcctgcgggtaacg

SEQ ID NO: 174074 - DNA, 17 bp, Arabidopsis thaliana
caatcctttgcagacga

SEQ ID NO: 174075 - DNA, 17 bp, Arabidopsis thaliana
caatcgtggcgctgcac

SEQ ID NO: 174076 - DNA, 17 bp, Arabidopsis thaliana
caatctcaagatggatg

SEQ ID NO: 174077 - DNA, 17 bp, Arabidopsis thaliana
caatctcaagatggcag

SEQ ID NO: 174078 - DNA, 17 bp, Arabidopsis thaliana
caatctccaaaggagtg

SEQ ID NO: 174079 - DNA, 17 bp, Arabidopsis thaliana
caatctggtcgtcggtg

SEQ ID NO: 174080 - DNA, 17 bp, Arabidopsis thaliana
caatcttcaggttttcc

SEQ ID NO: 174081 - DNA, 17 bp, Arabidopsis thaliana
caatcttttcggctata

SEQ ID NO: 174082 - DNA, 17 bp, Arabidopsis thaliana
caatgaatcagaagcat

SEQ ID NO: 174083 - DNA, 17 bp, Arabidopsis thaliana
caatgcattgaaagtga

SEQ ID NO: 174084 - DNA, 17 bp, Arabidopsis thaliana
caatgctttttctagtt

SEQ ID NO: 174085 - DNA, 17 bp, Arabidopsis thaliana
caatggacaatgaatca

SEQ ID NO: 174086 - DNA, 17 bp, Arabidopsis thaliana
caatggctgagcgtctt

SEQ ID NO: 174087 - DNA, 17 bp, Arabidopsis thaliana
caatggctgggttttgg

SEQ ID NO: 174088 - DNA, 17 bp, Arabidopsis thaliana
caatggcttgtcttgtt

SEQ ID NO: 174089 - DNA, 17 bp, Arabidopsis thaliana
caatgtaggcaagggaa

SEQ ID NO: 174090 - DNA, 17 bp, Arabidopsis thaliana
caatgtctcagcacagc

SEQ ID NO: 174091 - DNA, 17 bp, Arabidopsis thaliana
caatgtcttgctgtaat

SEQ ID NO: 174092 - DNA, 17 bp, Arabidopsis thaliana
caatgtcttttctagtt

SEQ ID NO: 174093 - DNA, 17 bp, Arabidopsis thaliana
caatgttcatgtgtcta

SEQ ID NO: 174094 - DNA, 17 bp, Arabidopsis thaliana
caattatgtcttggata

SEQ ID NO: 174095 - DNA, 17 bp, Arabidopsis thaliana
caattcagtagggacct

SEQ ID NO: 174096 - DNA, 17 bp, Arabidopsis thaliana
caattcctcgggtcgga

SEQ ID NO: 174097 - DNA, 17 bp, Arabidopsis thaliana
caattctacagcgttgg

SEQ ID NO: 174098 - DNA, 17 bp, Arabidopsis thaliana
caattctgatgcggccg

SEQ ID NO: 174099 - DNA, 17 bp, Arabidopsis thaliana
caattctgatgcgggcg

SEQ ID NO: 174100 - DNA, 17 bp, Arabidopsis thaliana
caattgatttagatggt

SEQ ID NO: 174101 - DNA, 17 bp, Arabidopsis thaliana
caattgtgcgaatcaac

SEQ ID NO: 174102 - DNA, 17 bp, Arabidopsis thaliana
caattgttggtcttcaa

SEQ ID NO: 174103 - DNA, 17 bp, Arabidopsis thaliana
caatttcaccatagcgg

SEQ ID NO: 174104 - DNA, 17 bp, Arabidopsis thaliana
caatttgatgtggtaat

SEQ ID NO: 174105 - DNA, 17 bp, Arabidopsis thaliana
caattttttttggactt

SEQ ID NO: 174106 - DNA, 17 bp, Arabidopsis thaliana
caatttttttttggact

SEQ ID NO: 174107 - DNA, 17 bp, Arabidopsis thaliana
cacaaaataaggaatgc

SEQ ID NO: 174108 - DNA, 17 bp, Arabidopsis thaliana
cacaaagctactggcag

SEQ ID NO: 174109 - DNA, 17 bp, Arabidopsis thaliana
cacaacaatattccgtt

SEQ ID NO: 174110 - DNA, 17 bp, Arabidopsis thaliana
cacaacattcttatgca

SEQ ID NO: 174111 - DNA, 17 bp, Arabidopsis thaliana
cacaagagacttttttt

SEQ ID NO: 174112 - DNA, 17 bp, Arabidopsis thaliana
cacaagtcgcgttggac

SEQ ID NO: 174113 - DNA, 17 bp, Arabidopsis thaliana
cacaatcggcaccagac

SEQ ID NO: 174114 - DNA, 17 bp, Arabidopsis thaliana
cacaatcttttctgaca

SEQ ID NO: 174115 - DNA, 17 bp, Arabidopsis thaliana
cacaatttgatgtggta

SEQ ID NO: 174116 - DNA, 17 bp, Arabidopsis thaliana
cacaatttgatgtgtta

SEQ ID NO: 174117 - DNA, 17 bp, Arabidopsis thaliana
cacaccgcccgtcgctc

SEQ ID NO: 174118 - DNA, 17 bp, Arabidopsis thaliana
cacaccttggccgacag

SEQ ID NO: 174119 - DNA, 17 bp, Arabidopsis thaliana
cacacgggagaccagct

SEQ ID NO: 174120 - DNA, 17 bp, Arabidopsis thaliana
cacacggggaccagctt

SEQ ID NO: 174121 - DNA, 17 bp, Arabidopsis thaliana
cacactcgcattgtctg

SEQ ID NO: 174122 - DNA, 17 bp, Arabidopsis thaliana
cacactgatgctgacac

SEQ ID NO: 174123 - DNA, 17 bp, Arabidopsis thaliana
cacagaacccagtgggt

SEQ ID NO: 174124 - DNA, 17 bp, Arabidopsis thaliana
cacagacccgggttcgt

SEQ ID NO: 174125 - DNA, 17 bp, Arabidopsis thaliana
cacagaggccatgcgat

SEQ ID NO: 174126 - DNA, 17 bp, Arabidopsis thaliana
cacagcttctagtgacg

SEQ ID NO: 174127 - DNA, 17 bp, Arabidopsis thaliana
cacagggataactggct

SEQ ID NO: 174128 - DNA, 17 bp, Arabidopsis thaliana
cacaggtgagaaatctg

SEQ ID NO: 174129 - DNA, 17 bp, Arabidopsis thaliana
cacaggtgggagcggta

SEQ ID NO: 174130 - DNA, 17 bp, Arabidopsis thaliana
cacaggtggtgcatggc

SEQ ID NO: 174131 - DNA, 17 bp, Arabidopsis thaliana
cacagtatatggttgca

SEQ ID NO: 174132 - DNA, 17 bp, Arabidopsis thaliana
cacagtgccttcgcaga

SEQ ID NO: 174133 - DNA, 17 bp, Arabidopsis thaliana
cacagtgccttctcaga

SEQ ID NO: 174134 - DNA, 17 bp, Arabidopsis thaliana
cacatacttgagcaaag

SEQ ID NO: 174135 - DNA, 17 bp, Arabidopsis thaliana
cacatcaaattgtgtta

SEQ ID NO: 174136 - DNA, 17 bp, Arabidopsis thaliana
cacatcctgtagatgga

SEQ ID NO: 174137 - DNA, 17 bp, Arabidopsis thaliana
cacatcgcaggtgaggg

SEQ ID NO: 174138 - DNA, 17 bp, Arabidopsis thaliana
cacatgttagtgcaaca

SEQ ID NO: 174139 - DNA, 17 bp, Arabidopsis thaliana
cacattgcacccgccgg

SEQ ID NO: 174140 - DNA, 17 bp, Arabidopsis thaliana
cacattgcctctgatgc

SEQ ID NO: 174141 - DNA, 17 bp, Arabidopsis thaliana
cacatttctacaagttg

SEQ ID NO: 174142 - DNA, 17 bp, Arabidopsis thaliana
caccaaaggcggaccga

SEQ ID NO: 174143 - DNA, 17 bp, Arabidopsis thaliana
caccaaaggcggaccgg

SEQ ID NO: 174144 - DNA, 17 bp, Arabidopsis thaliana
caccaagatctgcaccg

SEQ ID NO: 174145 - DNA, 17 bp, Arabidopsis thaliana
caccaccaggagtggag

SEQ ID NO: 174146 - DNA, 17 bp, Arabidopsis thaliana
caccaccatatgttagg

SEQ ID NO: 174147 - DNA, 17 bp, Arabidopsis thaliana
caccaccgttaatcacg

SEQ ID NO: 174148 - DNA, 17 bp, Arabidopsis thaliana
caccacgaggcgctgtc

SEQ ID NO: 174149 - DNA, 17 bp, Arabidopsis thaliana
caccactaggatggcga

SEQ ID NO: 174150 - DNA, 17 bp, Arabidopsis thaliana
caccagacttatgtcac

SEQ ID NO: 174151 - DNA, 17 bp, Arabidopsis thaliana
caccagacttgcgccgg

SEQ ID NO: 174152 - DNA, 17 bp, Arabidopsis thaliana
caccaggagtggagcct

SEQ ID NO: 174153 - DNA, 17 bp, Arabidopsis thaliana
caccaggctctattttc

SEQ ID NO: 174154 - DNA, 17 bp, Arabidopsis thaliana
caccagggcctcctgcg

SEQ ID NO: 174155 - DNA, 17 bp, Arabidopsis thaliana
caccaggggtggagcct

SEQ ID NO: 174156 - DNA, 17 bp, Arabidopsis thaliana
caccaggtcagctcctt

SEQ ID NO: 174157 - DNA, 17 bp, Arabidopsis thaliana
caccagtggtctagtgg

SEQ ID NO: 174158 - DNA, 17 bp, Arabidopsis thaliana
caccagttaccacgcag

SEQ ID NO: 174159 - DNA, 17 bp, Arabidopsis thaliana
caccatcccaggacaga

SEQ ID NO: 174160 - DNA, 17 bp, Arabidopsis thaliana
cacccacgtcgccgcga

SEQ ID NO: 174161 - DNA, 17 bp, Arabidopsis thaliana
cacccataccccgcccc

SEQ ID NO: 174162 - DNA, 17 bp, Arabidopsis thaliana
caccctggaaacggctc

SEQ ID NO: 174163 - DNA, 17 bp, Arabidopsis thaliana
caccgacgacatctttg

SEQ ID NO: 174164 - DNA, 17 bp, Arabidopsis thaliana
caccgacggccgctccg

SEQ ID NO: 174165 - DNA, 17 bp, Arabidopsis thaliana
caccgcaaggagctgac

SEQ ID NO: 174166 - DNA, 17 bp, Arabidopsis thaliana
caccgcagggagctgac

SEQ ID NO: 174167 - DNA, 17 bp, Arabidopsis thaliana
caccgcccgtcgctact

SEQ ID NO: 174168 - DNA, 17 bp, Arabidopsis thaliana
caccggaataaccgccg

SEQ ID NO: 174169 - DNA, 17 bp, Arabidopsis thaliana
caccggagccgtagcga

SEQ ID NO: 174170 - DNA, 17 bp, Arabidopsis thaliana
caccggtgagtcttacg

SEQ ID NO: 174171 - DNA, 17 bp, Arabidopsis thaliana
caccgtcctgctgtcgg

SEQ ID NO: 174172 - DNA, 17 bp, Arabidopsis thaliana
caccgtcgtgcccgggg

SEQ ID NO: 174173 - DNA, 17 bp, Arabidopsis thaliana
caccgtctcactggccg

SEQ ID NO: 174174 - DNA, 17 bp, Arabidopsis thaliana
caccgtctcactggctg

SEQ ID NO: 174175 - DNA, 17 bp, Arabidopsis thaliana
caccgtctgcgggggca

SEQ ID NO: 174176 - DNA, 17 bp, Arabidopsis thaliana
caccgtggactccctca

SEQ ID NO: 174177 - DNA, 17 bp, Arabidopsis thaliana
cacctacagatgcgact

SEQ ID NO: 174178 - DNA, 17 bp, Arabidopsis thaliana
cacctacaggatgcgtc

SEQ ID NO: 174179 - DNA, 17 bp, Arabidopsis thaliana
cacctatcctacacatt

SEQ ID NO: 174180 - DNA, 17 bp, Arabidopsis thaliana
cacctcccgactgtcga

SEQ ID NO: 174181 - DNA, 17 bp, Arabidopsis thaliana
cacctgacagaagatag

SEQ ID NO: 174182 - DNA, 17 bp, Arabidopsis thaliana
cacctgcggaaggatca

SEQ ID NO: 174183 - DNA, 17 bp, Arabidopsis thaliana
cacctggacctggatcg

SEQ ID NO: 174184 - DNA, 17 bp, Arabidopsis thaliana
caccttggagacctgaa

SEQ ID NO: 174185 - DNA, 17 bp, Arabidopsis thaliana
caccttggagacctgat

SEQ ID NO: 174186 - DNA, 17 bp, Arabidopsis thaliana
caccttggccgacaggc

SEQ ID NO: 174187 - DNA, 17 bp, Arabidopsis thaliana
cacctttccgatgtggg

SEQ ID NO: 174188 - DNA, 17 bp, Arabidopsis thaliana
cacgaaggagaagccgc

SEQ ID NO: 174189 - DNA, 17 bp, Arabidopsis thaliana
cacgacggggctctcac

SEQ ID NO: 174190 - DNA, 17 bp, Arabidopsis thaliana
cacgagatccctcccaa

SEQ ID NO: 174191 - DNA, 17 bp, Arabidopsis thaliana
cacgagatccctcccta

SEQ ID NO: 174192 - DNA, 17 bp, Arabidopsis thaliana
cacgagatctctcccaa

SEQ ID NO: 174193 - DNA, 17 bp, Arabidopsis thaliana
cacgagatctctccctc

SEQ ID NO: 174194 - DNA, 17 bp, Arabidopsis thaliana
cacgagtcgcttccaga

SEQ ID NO: 174195 - DNA, 17 bp, Arabidopsis thaliana
cacgatccactgagatt

SEQ ID NO: 174196 - DNA, 17 bp, Arabidopsis thaliana
cacgatgttcaatagat

SEQ ID NO: 174197 - DNA, 17 bp, Arabidopsis thaliana
cacgcacgagcacttcc

SEQ ID NO: 174198 - DNA, 17 bp, Arabidopsis thaliana
cacgcacgctacactga

SEQ ID NO: 174199 - DNA, 17 bp, Arabidopsis thaliana
cacgcagctagttagca

SEQ ID NO: 174200 - DNA, 17 bp, Arabidopsis thaliana
cacgcattgagtttcgt

SEQ ID NO: 174201 - DNA, 17 bp, Arabidopsis thaliana
cacgcccggtcgtactc

SEQ ID NO: 174202 - DNA, 17 bp, Arabidopsis thaliana
cacgcctgcctgggtgt

SEQ ID NO: 174203 - DNA, 17 bp, Arabidopsis thaliana
cacgcggttggcctaaa

SEQ ID NO: 174204 - DNA, 17 bp, Arabidopsis thaliana
cacgctaagtggcatac

SEQ ID NO: 174205 - DNA, 17 bp, Arabidopsis thaliana
cacggaacctaccgcag

SEQ ID NO: 174206 - DNA, 17 bp, Arabidopsis thaliana
cacggaccaaggagtct

SEQ ID NO: 174207 - DNA, 17 bp, Arabidopsis thaliana
cacggatccggcgggca

SEQ ID NO: 174208 - DNA, 17 bp, Arabidopsis thaliana
cacgggattgaaggtcg

SEQ ID NO: 174209 - DNA, 17 bp, Arabidopsis thaliana
cacgggcttggctcatc

SEQ ID NO: 174210 - DNA, 17 bp, Arabidopsis thaliana
cacggggaaacttacca

SEQ ID NO: 174211 - DNA, 17 bp, Arabidopsis thaliana
cacggggaggtagtgac

SEQ ID NO: 174212 - DNA, 17 bp, Arabidopsis thaliana
cacggtgccactcctat

SEQ ID NO: 174213 - DNA, 17 bp, Arabidopsis thaliana
cacgtacttaacttctc

SEQ ID NO: 174214 - DNA, 17 bp, Arabidopsis thaliana
cacgtagctagttagca

SEQ ID NO: 174215 - DNA, 17 bp, Arabidopsis thaliana
cacgtagctagttagcg

SEQ ID NO: 174216 - DNA, 17 bp, Arabidopsis thaliana
cacgtagctagttaggg

SEQ ID NO: 174217 - DNA, 17 bp, Arabidopsis thaliana
cacgtcagtatcgctgc

SEQ ID NO: 174218 - DNA, 17 bp, Arabidopsis thaliana
cacgtcgccgcgatccg

SEQ ID NO: 174219 - DNA, 17 bp, Arabidopsis thaliana
cacgtcgcgtggtgtcc

SEQ ID NO: 174220 - DNA, 17 bp, Arabidopsis thaliana
cacgtctgcccgggtgt

SEQ ID NO: 174221 - DNA, 17 bp, Arabidopsis thaliana
cacgtctgcctgggcgt

SEQ ID NO: 174222 - DNA, 17 bp, Arabidopsis thaliana
cacgtctgcctgggtgc

SEQ ID NO: 174223 - DNA, 17 bp, Arabidopsis thaliana
cacgtctgcctgggtgt

SEQ ID NO: 174224 - DNA, 17 bp, Arabidopsis thaliana
cacgtctgcctgtgtca

SEQ ID NO: 174225 - DNA, 17 bp, Arabidopsis thaliana
cacgtgagattgggccc

SEQ ID NO: 174226 - DNA, 17 bp, Arabidopsis thaliana
cacgtgcaaaatttgag

SEQ ID NO: 174227 - DNA, 17 bp, Arabidopsis thaliana
cacgtgcctttgggagc

SEQ ID NO: 174228 - DNA, 17 bp, Arabidopsis thaliana
cacgtgcgagagtagtg

SEQ ID NO: 174229 - DNA, 17 bp, Arabidopsis thaliana
cacgtggccgtgggttc

SEQ ID NO: 174230 - DNA, 17 bp, Arabidopsis thaliana
cacgtgtcgttggctaa

SEQ ID NO: 174231 - DNA, 17 bp, Arabidopsis thaliana
cacgtgttctactactc

SEQ ID NO: 174232 - DNA, 17 bp, Arabidopsis thaliana
cactaagcagatttctc

SEQ ID NO: 174233 - DNA, 17 bp, Arabidopsis thaliana
cactaataaagactgta

SEQ ID NO: 174234 - DNA, 17 bp, Arabidopsis thaliana
cactaatgtagctgcgg

SEQ ID NO: 174235 - DNA, 17 bp, Arabidopsis thaliana
cactaattacggataac

SEQ ID NO: 174236 - DNA, 17 bp, Arabidopsis thaliana
cactaccactttgctgg

SEQ ID NO: 174237 - DNA, 17 bp, Arabidopsis thaliana
cactactcattattgga

SEQ ID NO: 174238 - DNA, 17 bp, Arabidopsis thaliana
cactatgggagctggcc

SEQ ID NO: 174239 - DNA, 17 bp, Arabidopsis thaliana
cactcaatgggctaggg

SEQ ID NO: 174240 - DNA, 17 bp, Arabidopsis thaliana
cactcacagcttggatt

SEQ ID NO: 174241 - DNA, 17 bp, Arabidopsis thaliana
cactcgaaagcaggacc

SEQ ID NO: 174242 - DNA, 17 bp, Arabidopsis thaliana
cactcgctgcaccaaac

SEQ ID NO: 174243 - DNA, 17 bp, Arabidopsis thaliana
cactcggggtaccaatt

SEQ ID NO: 174244 - DNA, 17 bp, Arabidopsis thaliana
cactcgtcttcttgatc

SEQ ID NO: 174245 - DNA, 17 bp, Arabidopsis thaliana
cactcgtggttgtatgg

SEQ ID NO: 174246 - DNA, 17 bp, Arabidopsis thaliana
cactctcagcttggact

SEQ ID NO: 174247 - DNA, 17 bp, Arabidopsis thaliana
cactctccaagggttcg

SEQ ID NO: 174248 - DNA, 17 bp, Arabidopsis thaliana
cactctcggtgggccgg

SEQ ID NO: 174249 - DNA, 17 bp, Arabidopsis thaliana
cactctgatggtgcaag

SEQ ID NO: 174250 - DNA, 17 bp, Arabidopsis thaliana
cactctgatggtgcgtg

SEQ ID NO: 174251 - DNA, 17 bp, Arabidopsis thaliana
cactctgttagatggac

SEQ ID NO: 174252 - DNA, 17 bp, Arabidopsis thaliana
cactgaaggacctaaac

SEQ ID NO: 174253 - DNA, 17 bp, Arabidopsis thaliana
cactgagattcagcccg

SEQ ID NO: 174254 - DNA, 17 bp, Arabidopsis thaliana
cactgagattcagccct

SEQ ID NO: 174255 - DNA, 17 bp, Arabidopsis thaliana
cactgagctatggaccc

SEQ ID NO: 174256 - DNA, 17 bp, Arabidopsis thaliana
cactgagctatgggccc

SEQ ID NO: 174257 - DNA, 17 bp, Arabidopsis thaliana
cactgcgctatgcggtc

SEQ ID NO: 174258 - DNA, 17 bp, Arabidopsis thaliana
cactgctgagagcggga

SEQ ID NO: 174259 - DNA, 17 bp, Arabidopsis thaliana
cactggcttttcaacca

SEQ ID NO: 174260 - DNA, 17 bp, Arabidopsis thaliana
cactgggactgagacac

SEQ ID NO: 174261 - DNA, 17 bp, Arabidopsis thaliana
cactgttatggtagggc

SEQ ID NO: 174262 - DNA, 17 bp, Arabidopsis thaliana
cacttcaggacaagagt

SEQ ID NO: 174263 - DNA, 17 bp, Arabidopsis thaliana
cactttgcgcacgatcc

SEQ ID NO: 174264 - DNA, 17 bp, Arabidopsis thaliana
cactttggccgagtggt

SEQ ID NO: 174265 - DNA, 17 bp, Arabidopsis thaliana
cacttttgtggactatg

SEQ ID NO: 174266 - DNA, 17 bp, Arabidopsis thaliana
cagaaaagatcgactcc

SEQ ID NO: 174267 - DNA, 17 bp, Arabidopsis thaliana
cagaaaagttaccacag

SEQ ID NO: 174268 - DNA, 17 bp, Arabidopsis thaliana
cagaaagttttcttccg

SEQ ID NO: 174269 - DNA, 17 bp, Arabidopsis thaliana
cagaaattggtacagta

SEQ ID NO: 174270 - DNA, 17 bp, Arabidopsis thaliana
cagaaattggtacagtc

SEQ ID NO: 174271 - DNA, 17 bp, Arabidopsis thaliana
cagaacagagtgatgtt

SEQ ID NO: 174272 - DNA, 17 bp, Arabidopsis thaliana
cagaacccaaatggctg

SEQ ID NO: 174273 - DNA, 17 bp, Arabidopsis thaliana
cagaaccgcgttcccca

SEQ ID NO: 174274 - DNA, 17 bp, Arabidopsis thaliana
cagaaccggcccgtgga

SEQ ID NO: 174275 - DNA, 17 bp, Arabidopsis thaliana
cagaactccgtagttaa

SEQ ID NO: 174276 - DNA, 17 bp, Arabidopsis thaliana
cagaactggcgatgcgg

SEQ ID NO: 174277 - DNA, 17 bp, Arabidopsis thaliana
cagaactggcgatgtag

SEQ ID NO: 174278 - DNA, 17 bp, Arabidopsis thaliana
cagaagaataagagttc

SEQ ID NO: 174279 - DNA, 17 bp, Arabidopsis thaliana
cagaagacaagtggaca

SEQ ID NO: 174280 - DNA, 17 bp, Arabidopsis thaliana
cagaagacaagtggacg

SEQ ID NO: 174281 - DNA, 17 bp, Arabidopsis thaliana
cagaagcattccttatt

SEQ ID NO: 174282 - DNA, 17 bp, Arabidopsis thaliana
cagaatattgttgtgtt

SEQ ID NO: 174283 - DNA, 17 bp, Arabidopsis thaliana
cagaatcaaggcaagaa

SEQ ID NO: 174284 - DNA, 17 bp, Arabidopsis thaliana
cagaatcttgatgatgc

SEQ ID NO: 174285 - DNA, 17 bp, Arabidopsis thaliana
cagacaaactgcaggca

SEQ ID NO: 174286 - DNA, 17 bp, Arabidopsis thaliana
cagacaaggatgacttg

SEQ ID NO: 174287 - DNA, 17 bp, Arabidopsis thaliana
cagacatggcgggctac

SEQ ID NO: 174288 - DNA, 17 bp, Arabidopsis thaliana
cagaccaaagatgtcgc

SEQ ID NO: 174289 - DNA, 17 bp, Arabidopsis thaliana
cagaccaaagatgtcgt

SEQ ID NO: 174290 - DNA, 17 bp, Arabidopsis thaliana
cagaccatttgtgagaa

SEQ ID NO: 174291 - DNA, 17 bp, Arabidopsis thaliana
cagaccccacttctgac

SEQ ID NO: 174292 - DNA, 17 bp, Arabidopsis thaliana
cagacccgggttcgttt

SEQ ID NO: 174293 - DNA, 17 bp, Arabidopsis thaliana
cagaccggtagacttga

SEQ ID NO: 174294 - DNA, 17 bp, Arabidopsis thaliana
cagacctgccgccgaat

SEQ ID NO: 174295 - DNA, 17 bp, Arabidopsis thaliana
cagacgaggaagtcgac

SEQ ID NO: 174296 - DNA, 17 bp, Arabidopsis thaliana
cagacgtgcggtgctct

SEQ ID NO: 174297 - DNA, 17 bp, Arabidopsis thaliana
cagactacaattcgaag

SEQ ID NO: 174298 - DNA, 17 bp, Arabidopsis thaliana
cagactcgaaagagccc

SEQ ID NO: 174299 - DNA, 17 bp, Arabidopsis thaliana
cagactcgaaagagcga

SEQ ID NO: 174300 - DNA, 17 bp, Arabidopsis thaliana
cagactgagagctcgct

SEQ ID NO: 174301 - DNA, 17 bp, Arabidopsis thaliana
cagactgagagctcttt

SEQ ID NO: 174302 - DNA, 17 bp, Arabidopsis thaliana
cagactgtgaaactgcg

SEQ ID NO: 174303 - DNA, 17 bp, Arabidopsis thaliana
cagagaagattagcatg

SEQ ID NO: 174304 - DNA, 17 bp, Arabidopsis thaliana
cagagacaacatccaag

SEQ ID NO: 174305 - DNA, 17 bp, Arabidopsis thaliana
cagagacagcgatgaga

SEQ ID NO: 174306 - DNA, 17 bp, Arabidopsis thaliana
cagagagatcagtttct

SEQ ID NO: 174307 - DNA, 17 bp, Arabidopsis thaliana
cagagaggatcgtcctg

SEQ ID NO: 174308 - DNA, 17 bp, Arabidopsis thaliana
cagagattgtggcggct

SEQ ID NO: 174309 - DNA, 17 bp, Arabidopsis thaliana
cagagcccagacattgc

SEQ ID NO: 174310 - DNA, 17 bp, Arabidopsis thaliana
cagagggttttagcgat

SEQ ID NO: 174311 - DNA, 17 bp, Arabidopsis thaliana
cagaggtttatcgagat

SEQ ID NO: 174312 - DNA, 17 bp, Arabidopsis thaliana
cagataaaagtcgatta

SEQ ID NO: 174313 - DNA, 17 bp, Arabidopsis thaliana
cagatagctatgagacc

SEQ ID NO: 174314 - DNA, 17 bp, Arabidopsis thaliana
cagataggctgatggcg

SEQ ID NO: 174315 - DNA, 17 bp, Arabidopsis thaliana
cagatccatttctaagc

SEQ ID NO: 174316 - DNA, 17 bp, Arabidopsis thaliana
cagatctcggtgagagt

SEQ ID NO: 174317 - DNA, 17 bp, Arabidopsis thaliana
cagatctggttgacaac

SEQ ID NO: 174318 - DNA, 17 bp, Arabidopsis thaliana
cagatctggttgacatc

SEQ ID NO: 174319 - DNA, 17 bp, Arabidopsis thaliana
cagatcttggtggtagt

SEQ ID NO: 174320 - DNA, 17 bp, Arabidopsis thaliana
cagatgctgcaagggtt

SEQ ID NO: 174321 - DNA, 17 bp, Arabidopsis thaliana
cagatggttcagcaagt

SEQ ID NO: 174322 - DNA, 17 bp, Arabidopsis thaliana
cagatgtgccgccccag

SEQ ID NO: 174323 - DNA, 17 bp, Arabidopsis thaliana
cagattagtctacggcc

SEQ ID NO: 174324 - DNA, 17 bp, Arabidopsis thaliana
cagattcttgcaccaat

SEQ ID NO: 174325 - DNA, 17 bp, Arabidopsis thaliana
cagcaaaggatgacttg

SEQ ID NO: 174326 - DNA, 17 bp, Arabidopsis thaliana
cagcaaaggatggtgag

SEQ ID NO: 174327 - DNA, 17 bp, Arabidopsis thaliana
cagcaaccgcaggagac

SEQ ID NO: 174328 - DNA, 17 bp, Arabidopsis thaliana
cagcacaatttacctgc

SEQ ID NO: 174329 - DNA, 17 bp, Arabidopsis thaliana
cagcaccagacagagac

SEQ ID NO: 174330 - DNA, 17 bp, Arabidopsis thaliana
cagcacctggttgccga

SEQ ID NO: 174331 - DNA, 17 bp, Arabidopsis thaliana
cagcacgtgacgcacgc

SEQ ID NO: 174332 - DNA, 17 bp, Arabidopsis thaliana
cagcagaacgcgcaaaa

SEQ ID NO: 174333 - DNA, 17 bp, Arabidopsis thaliana
cagcagccgcggcaatt

SEQ ID NO: 174334 - DNA, 17 bp, Arabidopsis thaliana
cagcagccgcggtaatt

SEQ ID NO: 174335 - DNA, 17 bp, Arabidopsis thaliana
cagcagcgtcgctgagc

SEQ ID NO: 174336 - DNA, 17 bp, Arabidopsis thaliana
cagcagctctcggtctt

SEQ ID NO: 174337 - DNA, 17 bp, Arabidopsis thaliana
cagcaggacggtggcca

SEQ ID NO: 174338 - DNA, 17 bp, Arabidopsis thaliana
cagcaggacggtggtca

SEQ ID NO: 174339 - DNA, 17 bp, Arabidopsis thaliana
cagcaggtctccaaggt

SEQ ID NO: 174340 - DNA, 17 bp, Arabidopsis thaliana
cagcatcatcaagatta

SEQ ID NO: 174341 - DNA, 17 bp, Arabidopsis thaliana
cagccaaactcccccct

SEQ ID NO: 174342 - DNA, 17 bp, Arabidopsis thaliana
cagccaaagatgacttg

SEQ ID NO: 174343 - DNA, 17 bp, Arabidopsis thaliana
cagccaacgatgacttg

SEQ ID NO: 174344 - DNA, 17 bp, Arabidopsis thaliana
cagccaagaatgacttg

SEQ ID NO: 174345 - DNA, 17 bp, Arabidopsis thaliana
cagccaagcgttcatag

SEQ ID NO: 174346 - DNA, 17 bp, Arabidopsis thaliana
cagccaaggacgacttg

SEQ ID NO: 174347 - DNA, 17 bp, Arabidopsis thaliana
cagccaaggataacttg

SEQ ID NO: 174348 - DNA, 17 bp, Arabidopsis thaliana
cagccaaggatacttgc

SEQ ID NO: 174349 - DNA, 17 bp, Arabidopsis thaliana
cagccaaggatcacttg

SEQ ID NO: 174350 - DNA, 17 bp, Arabidopsis thaliana
cagccaaggatgacatg

SEQ ID NO: 174351 - DNA, 17 bp, Arabidopsis thaliana
cagccaaggatgacctg

SEQ ID NO: 174352 - DNA, 17 bp, Arabidopsis thaliana
cagccaaggatgactcg

SEQ ID NO: 174353 - DNA, 17 bp, Arabidopsis thaliana
cagccaaggatgactga

SEQ ID NO: 174354 - DNA, 17 bp, Arabidopsis thaliana
cagccaaggatgactta

SEQ ID NO: 174355 - DNA, 17 bp, Arabidopsis thaliana
cagccaaggatgacttc

SEQ ID NO: 174356 - DNA, 17 bp, Arabidopsis thaliana
cagccaaggatgacttg

SEQ ID NO: 174357 - DNA, 17 bp, Arabidopsis thaliana
cagccaaggatgacttt

SEQ ID NO: 174358 - DNA, 17 bp, Arabidopsis thaliana
cagccaaggatgattgc

SEQ ID NO: 174359 - DNA, 17 bp, Arabidopsis thaliana
cagccaaggatgatttg

SEQ ID NO: 174360 - DNA, 17 bp, Arabidopsis thaliana
cagccaaggatggcttg

SEQ ID NO: 174361 - DNA, 17 bp, Arabidopsis thaliana
cagccaaggatgtcttg

SEQ ID NO: 174362 - DNA, 17 bp, Arabidopsis thaliana
cagccaaggattacttg

SEQ ID NO: 174363 - DNA, 17 bp, Arabidopsis thaliana
cagccaagggaacgggc

SEQ ID NO: 174364 - DNA, 17 bp, Arabidopsis thaliana
cagccaagggtgacttg

SEQ ID NO: 174365 - DNA, 17 bp, Arabidopsis thaliana
cagccaagtatgacttg

SEQ ID NO: 174366 - DNA, 17 bp, Arabidopsis thaliana
cagccagtcgacagcat

SEQ ID NO: 174367 - DNA, 17 bp, Arabidopsis thaliana
cagccatgagttctgtg

SEQ ID NO: 174368 - DNA, 17 bp, Arabidopsis thaliana
cagccatgatgacttgc

SEQ ID NO: 174369 - DNA, 17 bp, Arabidopsis thaliana
cagccatttgggctctg

SEQ ID NO: 174370 - DNA, 17 bp, Arabidopsis thaliana
cagccatttgggttctg

SEQ ID NO: 174371 - DNA, 17 bp, Arabidopsis thaliana
cagcccagatcgtacgc

SEQ ID NO: 174372 - DNA, 17 bp, Arabidopsis thaliana
cagccccgccgggacca

SEQ ID NO: 174373 - DNA, 17 bp, Arabidopsis thaliana
cagcccggaacaatgca

SEQ ID NO: 174374 - DNA, 17 bp, Arabidopsis thaliana
cagcccgtacgcctacc

SEQ ID NO: 174375 - DNA, 17 bp, Arabidopsis thaliana
cagccctcagagccaat

SEQ ID NO: 174376 - DNA, 17 bp, Arabidopsis thaliana
cagccctttgtcgctaa

SEQ ID NO: 174377 - DNA, 17 bp, Arabidopsis thaliana
cagccgaagtttccctc

SEQ ID NO: 174378 - DNA, 17 bp, Arabidopsis thaliana
cagccgaggatgacttg

SEQ ID NO: 174379 - DNA, 17 bp, Arabidopsis thaliana
cagccgcggtaattcca

SEQ ID NO: 174380 - DNA, 17 bp, Arabidopsis thaliana
cagccggaggtagggtc

SEQ ID NO: 174381 - DNA, 17 bp, Arabidopsis thaliana
cagccgtggtgacaacg

SEQ ID NO: 174382 - DNA, 17 bp, Arabidopsis thaliana
cagcctgctaactagct

SEQ ID NO: 174383 - DNA, 17 bp, Arabidopsis thaliana
cagccttcttcttggat

SEQ ID NO: 174384 - DNA, 17 bp, Arabidopsis thaliana
cagccttgcgactatac

SEQ ID NO: 174385 - DNA, 17 bp, Arabidopsis thaliana
cagcgaaactgcgaatg

SEQ ID NO: 174386 - DNA, 17 bp, Arabidopsis thaliana
cagcgaagtggcccaga

SEQ ID NO: 174387 - DNA, 17 bp, Arabidopsis thaliana
cagcgaattttactgga

SEQ ID NO: 174388 - DNA, 17 bp, Arabidopsis thaliana
cagcgacgggattgaag

SEQ ID NO: 174389 - DNA, 17 bp, Arabidopsis thaliana
cagcgccggaggcacga

SEQ ID NO: 174390 - DNA, 17 bp, Arabidopsis thaliana
cagcgggcgtgcttgtg

SEQ ID NO: 174391 - DNA, 17 bp, Arabidopsis thaliana
cagcggggaaagaagac

SEQ ID NO: 174392 - DNA, 17 bp, Arabidopsis thaliana
cagcgtctatatctgaa

SEQ ID NO: 174393 - DNA, 17 bp, Arabidopsis thaliana
cagcgtgttggcccaaa

SEQ ID NO: 174394 - DNA, 17 bp, Arabidopsis thaliana
cagctaaggatgacttg

SEQ ID NO: 174395 - DNA, 17 bp, Arabidopsis thaliana
cagctacaggatgcgac

SEQ ID NO: 174396 - DNA, 17 bp, Arabidopsis thaliana
cagctcaggagggatag

SEQ ID NO: 174397 - DNA, 17 bp, Arabidopsis thaliana
cagctccacctgttcaa

SEQ ID NO: 174398 - DNA, 17 bp, Arabidopsis thaliana
cagctcccgacactaat

SEQ ID NO: 174399 - DNA, 17 bp, Arabidopsis thaliana
cagctcctgttgcagct

SEQ ID NO: 174400 - DNA, 17 bp, Arabidopsis thaliana
cagctcgacgccactca

SEQ ID NO: 174401 - DNA, 17 bp, Arabidopsis thaliana
cagctcgagcagtccgc

SEQ ID NO: 174402 - DNA, 17 bp, Arabidopsis thaliana
cagctcgcgttgactac

SEQ ID NO: 174403 - DNA, 17 bp, Arabidopsis thaliana
cagctctatcttcgtta

SEQ ID NO: 174404 - DNA, 17 bp, Arabidopsis thaliana
cagctctctgggtccct

SEQ ID NO: 174405 - DNA, 17 bp, Arabidopsis thaliana
cagctgaacagaacatt

SEQ ID NO: 174406 - DNA, 17 bp, Arabidopsis thaliana
cagctgccgacatagca

SEQ ID NO: 174407 - DNA, 17 bp, Arabidopsis thaliana
cagctggcagcttcaga

SEQ ID NO: 174408 - DNA, 17 bp, Arabidopsis thaliana
cagctggttcaattctt

SEQ ID NO: 174409 - DNA, 17 bp, Arabidopsis thaliana
cagctgtgatcaccggt

SEQ ID NO: 174410 - DNA, 17 bp, Arabidopsis thaliana
cagctgttagccaacaa

SEQ ID NO: 174411 - DNA, 17 bp, Arabidopsis thaliana
cagcttgaaaatcggac

SEQ ID NO: 174412 - DNA, 17 bp, Arabidopsis thaliana
cagcttgcgttgactac

SEQ ID NO: 174413 - DNA, 17 bp, Arabidopsis thaliana
cagcttggactgggcag

SEQ ID NO: 174414 - DNA, 17 bp, Arabidopsis thaliana
caggacaccattggagg

SEQ ID NO: 174415 - DNA, 17 bp, Arabidopsis thaliana
caggacgcttgttagga

SEQ ID NO: 174416 - DNA, 17 bp, Arabidopsis thaliana
caggacggtggtcatgg

SEQ ID NO: 174417 - DNA, 17 bp, Arabidopsis thaliana
caggagaacatgatcgt

SEQ ID NO: 174418 - DNA, 17 bp, Arabidopsis thaliana
caggagacaacttcggg

SEQ ID NO: 174419 - DNA, 17 bp, Arabidopsis thaliana
caggagacccgggttcg

SEQ ID NO: 174420 - DNA, 17 bp, Arabidopsis thaliana
caggagagatcgaacca

SEQ ID NO: 174421 - DNA, 17 bp, Arabidopsis thaliana
caggagtcctgttgtgc

SEQ ID NO: 174422 - DNA, 17 bp, Arabidopsis thaliana
caggagtggagcctgcg

SEQ ID NO: 174423 - DNA, 17 bp, Arabidopsis thaliana
caggataagggccacca

SEQ ID NO: 174424 - DNA, 17 bp, Arabidopsis thaliana
caggatagctggagctc

SEQ ID NO: 174425 - DNA, 17 bp, Arabidopsis thaliana
caggatagttgaaaaag

SEQ ID NO: 174426 - DNA, 17 bp, Arabidopsis thaliana
caggattgtgaagtaga

SEQ ID NO: 174427 - DNA, 17 bp, Arabidopsis thaliana
caggcaaggatgacttg

SEQ ID NO: 174428 - DNA, 17 bp, Arabidopsis thaliana
caggcagaacccaaatg

SEQ ID NO: 174429 - DNA, 17 bp, Arabidopsis thaliana
caggcagtctccttggc

SEQ ID NO: 174430 - DNA, 17 bp, Arabidopsis thaliana
caggcccaagattcaaa

SEQ ID NO: 174431 - DNA, 17 bp, Arabidopsis thaliana
caggcccgggtaatctt

SEQ ID NO: 174432 - DNA, 17 bp, Arabidopsis thaliana
caggccgaccgactaag

SEQ ID NO: 174433 - DNA, 17 bp, Arabidopsis thaliana
caggcctgaccggaaga

SEQ ID NO: 174434 - DNA, 17 bp, Arabidopsis thaliana
caggcgacacgacctca

SEQ ID NO: 174435 - DNA, 17 bp, Arabidopsis thaliana
caggcgacggatgacga

SEQ ID NO: 174436 - DNA, 17 bp, Arabidopsis thaliana
caggcgaggcaggaaga

SEQ ID NO: 174437 - DNA, 17 bp, Arabidopsis thaliana
caggcgaggcgtattta

SEQ ID NO: 174438 - DNA, 17 bp, Arabidopsis thaliana
caggcggaggtctcggt

SEQ ID NO: 174439 - DNA, 17 bp, Arabidopsis thaliana
caggcttcggccgtccg

SEQ ID NO: 174440 - DNA, 17 bp, Arabidopsis thaliana
caggctttggtgaggta

SEQ ID NO: 174441 - DNA, 17 bp, Arabidopsis thaliana
cagggaaaactggcttg

SEQ ID NO: 174442 - DNA, 17 bp, Arabidopsis thaliana
cagggaacaagcagagc

SEQ ID NO: 174443 - DNA, 17 bp, Arabidopsis thaliana
cagggacacaaagcgag

SEQ ID NO: 174444 - DNA, 17 bp, Arabidopsis thaliana
cagggacagtcgggggc

SEQ ID NO: 174445 - DNA, 17 bp, Arabidopsis thaliana
cagggacgtagtcaacg

SEQ ID NO: 174446 - DNA, 17 bp, Arabidopsis thaliana
cagggagctgacctggt

SEQ ID NO: 174447 - DNA, 17 bp, Arabidopsis thaliana
cagggataactggcttg

SEQ ID NO: 174448 - DNA, 17 bp, Arabidopsis thaliana
cagggatcagcggatgt

SEQ ID NO: 174449 - DNA, 17 bp, Arabidopsis thaliana
cagggcagcgtcgaaat

SEQ ID NO: 174450 - DNA, 17 bp, Arabidopsis thaliana
cagggctagtgactgga

SEQ ID NO: 174451 - DNA, 17 bp, Arabidopsis thaliana
caggggtggagcctgcg

SEQ ID NO: 174452 - DNA, 17 bp, Arabidopsis thaliana
cagggttcgtttccctg

SEQ ID NO: 174453 - DNA, 17 bp, Arabidopsis thaliana
caggtaatcggcaggtt

SEQ ID NO: 174454 - DNA, 17 bp, Arabidopsis thaliana
caggtatgtcaagtcca

SEQ ID NO: 174455 - DNA, 17 bp, Arabidopsis thaliana
caggtcactgtgggaaa

SEQ ID NO: 174456 - DNA, 17 bp, Arabidopsis thaliana
caggtcggtggacagcg

SEQ ID NO: 174457 - DNA, 17 bp, Arabidopsis thaliana
caggtctccaaggtgaa

SEQ ID NO: 174458 - DNA, 17 bp, Arabidopsis thaliana
caggtctgtgatgccct

SEQ ID NO: 174459 - DNA, 17 bp, Arabidopsis thaliana
caggtggggagtttggc

SEQ ID NO: 174460 - DNA, 17 bp, Arabidopsis thaliana
caggtgtcccaaaggat

SEQ ID NO: 174461 - DNA, 17 bp, Arabidopsis thaliana
caggtgtcctaagatga

SEQ ID NO: 174462 - DNA, 17 bp, Arabidopsis thaliana
caggtgtcctaaggggg

SEQ ID NO: 174463 - DNA, 17 bp, Arabidopsis thaliana
caggttcacctacggaa

SEQ ID NO: 174464 - DNA, 17 bp, Arabidopsis thaliana
caggttcacctacgtac

SEQ ID NO: 174465 - DNA, 17 bp, Arabidopsis thaliana
caggttccgaataggaa

SEQ ID NO: 174466 - DNA, 17 bp, Arabidopsis thaliana
caggttcgagacctgcc

SEQ ID NO: 174467 - DNA, 17 bp, Arabidopsis thaliana
cagtaacaaagtatacc

SEQ ID NO: 174468 - DNA, 17 bp, Arabidopsis thaliana
cagtaccaggctgaccg

SEQ ID NO: 174469 - DNA, 17 bp, Arabidopsis thaliana
cagtagaggccgtaact

SEQ ID NO: 174470 - DNA, 17 bp, Arabidopsis thaliana
cagtagatggatccgca

SEQ ID NO: 174471 - DNA, 17 bp, Arabidopsis thaliana
cagtagctttgtgtctt

SEQ ID NO: 174472 - DNA, 17 bp, Arabidopsis thaliana
cagtagggacctcaaga

SEQ ID NO: 174473 - DNA, 17 bp, Arabidopsis thaliana
cagtatcgctgcgggcg

SEQ ID NO: 174474 - DNA, 17 bp, Arabidopsis thaliana
cagtatcgctgcgggct

SEQ ID NO: 174475 - DNA, 17 bp, Arabidopsis thaliana
cagtatcttatgcctcc

SEQ ID NO: 174476 - DNA, 17 bp, Arabidopsis thaliana
cagtatcttatgcgtcc

SEQ ID NO: 174477 - DNA, 17 bp, Arabidopsis thaliana
cagtatgttatgcgtcc

SEQ ID NO: 174478 - DNA, 17 bp, Arabidopsis thaliana
cagtcaaggatgacttg

SEQ ID NO: 174479 - DNA, 17 bp, Arabidopsis thaliana
cagtccgctgacagccg

SEQ ID NO: 174480 - DNA, 17 bp, Arabidopsis thaliana
cagtcctttgtcgctaa

SEQ ID NO: 174481 - DNA, 17 bp, Arabidopsis thaliana
cagtcgcatcctgtaga

SEQ ID NO: 174482 - DNA, 17 bp, Arabidopsis thaliana
cagtcgtcaagggctgt

SEQ ID NO: 174483 - DNA, 17 bp, Arabidopsis thaliana
cagtctccaagcccatc

SEQ ID NO: 174484 - DNA, 17 bp, Arabidopsis thaliana
cagtctggtcagcgcat

SEQ ID NO: 174485 - DNA, 17 bp, Arabidopsis thaliana
cagtctttattagtgag

SEQ ID NO: 174486 - DNA, 17 bp, Arabidopsis thaliana
cagtgaacgaaattgag

SEQ ID NO: 174487 - DNA, 17 bp, Arabidopsis thaliana
cagtggattagcgcttt

SEQ ID NO: 174488 - DNA, 17 bp, Arabidopsis thaliana
cagtggcagagtggcct

SEQ ID NO: 174489 - DNA, 17 bp, Arabidopsis thaliana
cagtggctttagttgac

SEQ ID NO: 174490 - DNA, 17 bp, Arabidopsis thaliana
cagtggttaggacatcg

SEQ ID NO: 174491 - DNA, 17 bp, Arabidopsis thaliana
cagtgtctaaactctct

SEQ ID NO: 174492 - DNA, 17 bp, Arabidopsis thaliana
cagttaagcgtgcttgg

SEQ ID NO: 174493 - DNA, 17 bp, Arabidopsis thaliana
cagttaagcgtgctttg

SEQ ID NO: 174494 - DNA, 17 bp, Arabidopsis thaliana
cagttaccaccagttgc

SEQ ID NO: 174495 - DNA, 17 bp, Arabidopsis thaliana
cagttaccacgcagttg

SEQ ID NO: 174496 - DNA, 17 bp, Arabidopsis thaliana
cagttatagtttgtttg

SEQ ID NO: 174497 - DNA, 17 bp, Arabidopsis thaliana
cagttcaaatccgggtg

SEQ ID NO: 174498 - DNA, 17 bp, Arabidopsis thaliana
cagttccttctgcgggc

SEQ ID NO: 174499 - DNA, 17 bp, Arabidopsis thaliana
cagttcggattgcaggc

SEQ ID NO: 174500 - DNA, 17 bp, Arabidopsis thaliana
cagttcggttcctacct

SEQ ID NO: 174501 - DNA, 17 bp, Arabidopsis thaliana
cagttcggttcctatct

SEQ ID NO: 174502 - DNA, 17 bp, Arabidopsis thaliana
cagttctcacccatcga

SEQ ID NO: 174503 - DNA, 17 bp, Arabidopsis thaliana
cagttctttctctcttt

SEQ ID NO: 174504 - DNA, 17 bp, Arabidopsis thaliana
cagttgcccaacgtaaa

SEQ ID NO: 174505 - DNA, 17 bp, Arabidopsis thaliana
cagttgcctaacgtaaa

SEQ ID NO: 174506 - DNA, 17 bp, Arabidopsis thaliana
cagttgcctaacgtaca

SEQ ID NO: 174507 - DNA, 17 bp, Arabidopsis thaliana
cagttgctaatacagtt

SEQ ID NO: 174508 - DNA, 17 bp, Arabidopsis thaliana
cagttgggcgacaccca

SEQ ID NO: 174509 - DNA, 17 bp, Arabidopsis thaliana
cagtttcacgaacccgg

SEQ ID NO: 174510 - DNA, 17 bp, Arabidopsis thaliana
cagtttcttctgcgggc

SEQ ID NO: 174511 - DNA, 17 bp, Arabidopsis thaliana
cagtttctttctaagtt

SEQ ID NO: 174512 - DNA, 17 bp, Arabidopsis thaliana
cagtttgggaatgctgc

SEQ ID NO: 174513 - DNA, 17 bp, Arabidopsis thaliana
cagtttgtcttttccaa

SEQ ID NO: 174514 - DNA, 17 bp, Arabidopsis thaliana
cagtttgttgactggtg

SEQ ID NO: 174515 - DNA, 17 bp, Arabidopsis thaliana
cagttttaacaagacct

SEQ ID NO: 174516 - DNA, 17 bp, Arabidopsis thaliana
cagttttgaaaagtatc

SEQ ID NO: 174517 - DNA, 17 bp, Arabidopsis thaliana
cagttttttacgattag

SEQ ID NO: 174518 - DNA, 17 bp, Arabidopsis thaliana
cataacagtgcaaaagt

SEQ ID NO: 174519 - DNA, 17 bp, Arabidopsis thaliana
cataacatactggtaaa

SEQ ID NO: 174520 - DNA, 17 bp, Arabidopsis thaliana
cataacggaggcctaga

SEQ ID NO: 174521 - DNA, 17 bp, Arabidopsis thaliana
cataacggaggggtgct

SEQ ID NO: 174522 - DNA, 17 bp, Arabidopsis thaliana
cataactgatgccattg

SEQ ID NO: 174523 - DNA, 17 bp, Arabidopsis thaliana
cataaggttcgtattga

SEQ ID NO: 174524 - DNA, 17 bp, Arabidopsis thaliana
cataaggttcgtattta

SEQ ID NO: 174525 - DNA, 17 bp, Arabidopsis thaliana
cataagtcttggtcgtg

SEQ ID NO: 174526 - DNA, 17 bp, Arabidopsis thaliana
cataatccagcgcacgg

SEQ ID NO: 174527 - DNA, 17 bp, Arabidopsis thaliana
catacaatctcaagatg

SEQ ID NO: 174528 - DNA, 17 bp, Arabidopsis thaliana
cataccagaggagcaga

SEQ ID NO: 174529 - DNA, 17 bp, Arabidopsis thaliana
cataccccacttctgac

SEQ ID NO: 174530 - DNA, 17 bp, Arabidopsis thaliana
cataccggaagggtgct

SEQ ID NO: 174531 - DNA, 17 bp, Arabidopsis thaliana
cataccgggagggtgct

SEQ ID NO: 174532 - DNA, 17 bp, Arabidopsis thaliana
catacgaccatacccac

SEQ ID NO: 174533 - DNA, 17 bp, Arabidopsis thaliana
catacgattcccggtta

SEQ ID NO: 174534 - DNA, 17 bp, Arabidopsis thaliana
catacggttagctaacg

SEQ ID NO: 174535 - DNA, 17 bp, Arabidopsis thaliana
catactacttatcgggt

SEQ ID NO: 174536 - DNA, 17 bp, Arabidopsis thaliana
catactccattttgcgg

SEQ ID NO: 174537 - DNA, 17 bp, Arabidopsis thaliana
catactccccccggaac

SEQ ID NO: 174538 - DNA, 17 bp, Arabidopsis thaliana
catactcctcccggaac

SEQ ID NO: 174539 - DNA, 17 bp, Arabidopsis thaliana
catactgaccagcaaat

SEQ ID NO: 174540 - DNA, 17 bp, Arabidopsis thaliana
catactgaccttcacga

SEQ ID NO: 174541 - DNA, 17 bp, Arabidopsis thaliana
catactgctgctgctgc

SEQ ID NO: 174542 - DNA, 17 bp, Arabidopsis thaliana
catactggtaaatggga

SEQ ID NO: 174543 - DNA, 17 bp, Arabidopsis thaliana
catagcgacgttgcttt

SEQ ID NO: 174544 - DNA, 17 bp, Arabidopsis thaliana
catagcgtaaaaaattg

SEQ ID NO: 174545 - DNA, 17 bp, Arabidopsis thaliana
catagcgtttgattgga

SEQ ID NO: 174546 - DNA, 17 bp, Arabidopsis thaliana
catagcttagcagcttt

SEQ ID NO: 174547 - DNA, 17 bp, Arabidopsis thaliana
cataggtctttaatccc

SEQ ID NO: 174548 - DNA, 17 bp, Arabidopsis thaliana
catagtaaggattgaca

SEQ ID NO: 174549 - DNA, 17 bp, Arabidopsis thaliana
catagtcgcactgtaga

SEQ ID NO: 174550 - DNA, 17 bp, Arabidopsis thaliana
catagtggatctgagag

SEQ ID NO: 174551 - DNA, 17 bp, Arabidopsis thaliana
catataaaatagaatga

SEQ ID NO: 174552 - DNA, 17 bp, Arabidopsis thaliana
catataaaatagaatgg

SEQ ID NO: 174553 - DNA, 17 bp, Arabidopsis thaliana
catatcatctggacggc

SEQ ID NO: 174554 - DNA, 17 bp, Arabidopsis thaliana
catatcccacagttgtc

SEQ ID NO: 174555 - DNA, 17 bp, Arabidopsis thaliana
catatcccggttgagcc

SEQ ID NO: 174556 - DNA, 17 bp, Arabidopsis thaliana
catatctgtcaactttt

SEQ ID NO: 174557 - DNA, 17 bp, Arabidopsis thaliana
catatcttaagtgtcgt

SEQ ID NO: 174558 - DNA, 17 bp, Arabidopsis thaliana
catatcttgatgatgct

SEQ ID NO: 174559 - DNA, 17 bp, Arabidopsis thaliana
catatgagatagggaag

SEQ ID NO: 174560 - DNA, 17 bp, Arabidopsis thaliana
catatgagatcggacca

SEQ ID NO: 174561 - DNA, 17 bp, Arabidopsis thaliana
catatgagctacacccc

SEQ ID NO: 174562 - DNA, 17 bp, Arabidopsis thaliana
catatgcagatgaagac

SEQ ID NO: 174563 - DNA, 17 bp, Arabidopsis thaliana
catatgccgataacaga

SEQ ID NO: 174564 - DNA, 17 bp, Arabidopsis thaliana
catatgccgataacagg

SEQ ID NO: 174565 - DNA, 17 bp, Arabidopsis thaliana
catatggactttggcta

SEQ ID NO: 174566 - DNA, 17 bp, Arabidopsis thaliana
catatggatgatgcact

SEQ ID NO: 174567 - DNA, 17 bp, Arabidopsis thaliana
catattagttgatcttg

SEQ ID NO: 174568 - DNA, 17 bp, Arabidopsis thaliana
catattccaggttgcgg

SEQ ID NO: 174569 - DNA, 17 bp, Arabidopsis thaliana
catattgatgtgcggcc

SEQ ID NO: 174570 - DNA, 17 bp, Arabidopsis thaliana
catattggcttctaccg

SEQ ID NO: 174571 - DNA, 17 bp, Arabidopsis thaliana
catcacaggatgcgact

SEQ ID NO: 174572 - DNA, 17 bp, Arabidopsis thaliana
catcaccgacaagttct

SEQ ID NO: 174573 - DNA, 17 bp, Arabidopsis thaliana
catcactaatgcaccgg

SEQ ID NO: 174574 - DNA, 17 bp, Arabidopsis thaliana
catcagagtgtatctaa

SEQ ID NO: 174575 - DNA, 17 bp, Arabidopsis thaliana
catcagagtgtatctca

SEQ ID NO: 174576 - DNA, 17 bp, Arabidopsis thaliana
catcagcaaaggatggt

SEQ ID NO: 174577 - DNA, 17 bp, Arabidopsis thaliana
catcagccgcgaaaagc

SEQ ID NO: 174578 - DNA, 17 bp, Arabidopsis thaliana
catcagcctctattttc

SEQ ID NO: 174579 - DNA, 17 bp, Arabidopsis thaliana
catcagctcgcgttgac

SEQ ID NO: 174580 - DNA, 17 bp, Arabidopsis thaliana
catcaggatgcgactag

SEQ ID NO: 174581 - DNA, 17 bp, Arabidopsis thaliana
catcagtacttaatttc

SEQ ID NO: 174582 - DNA, 17 bp, Arabidopsis thaliana
catcagtgtgcatgatc

SEQ ID NO: 174583 - DNA, 17 bp, Arabidopsis thaliana
catcagtgtgtatgatc

SEQ ID NO: 174584 - DNA, 17 bp, Arabidopsis thaliana
catcataggactgggag

SEQ ID NO: 174585 - DNA, 17 bp, Arabidopsis thaliana
catcatcaagattccga

SEQ ID NO: 174586 - DNA, 17 bp, Arabidopsis thaliana
catcattgatggtcttc

SEQ ID NO: 174587 - DNA, 17 bp, Arabidopsis thaliana
catccaaagatccatct

SEQ ID NO: 174588 - DNA, 17 bp, Arabidopsis thaliana
catccaaggaaggcagc

SEQ ID NO: 174589 - DNA, 17 bp, Arabidopsis thaliana
catccaaggatgacttg

SEQ ID NO: 174590 - DNA, 17 bp, Arabidopsis thaliana
catccaattccagatta

SEQ ID NO: 174591 - DNA, 17 bp, Arabidopsis thaliana
catccaattccagattg

SEQ ID NO: 174592 - DNA, 17 bp, Arabidopsis thaliana
catccaggatgcagact

SEQ ID NO: 174593 - DNA, 17 bp, Arabidopsis thaliana
catccaggatgcgacaa

SEQ ID NO: 174594 - DNA, 17 bp, Arabidopsis thaliana
catccaggatgcgacca

SEQ ID NO: 174595 - DNA, 17 bp, Arabidopsis thaliana
catccaggatgcgacta

SEQ ID NO: 174596 - DNA, 17 bp, Arabidopsis thaliana
catccaggatgcgactg

SEQ ID NO: 174597 - DNA, 17 bp, Arabidopsis thaliana
catccaggcaacacggc

SEQ ID NO: 174598 - DNA, 17 bp, Arabidopsis thaliana
catccagtagatggatc

SEQ ID NO: 174599 - DNA, 17 bp, Arabidopsis thaliana
catccatagcgtttgat

SEQ ID NO: 174600 - DNA, 17 bp, Arabidopsis thaliana
catcccaaggttcaacg

SEQ ID NO: 174601 - DNA, 17 bp, Arabidopsis thaliana
catcccaaggttgatcc

SEQ ID NO: 174602 - DNA, 17 bp, Arabidopsis thaliana
catcccaggatgcgact

SEQ ID NO: 174603 - DNA, 17 bp, Arabidopsis thaliana
catcccatttaccagta

SEQ ID NO: 174604 - DNA, 17 bp, Arabidopsis thaliana
catcccatttaccagtg

SEQ ID NO: 174605 - DNA, 17 bp, Arabidopsis thaliana
catcccgtagatggatc

SEQ ID NO: 174606 - DNA, 17 bp, Arabidopsis thaliana
catcccttcacggccgg

SEQ ID NO: 174607 - DNA, 17 bp, Arabidopsis thaliana
catccgcagggaccatc

SEQ ID NO: 174608 - DNA, 17 bp, Arabidopsis thaliana
catccggtcagcatcat

SEQ ID NO: 174609 - DNA, 17 bp, Arabidopsis thaliana
catcctcgcatctgtag

SEQ ID NO: 174610 - DNA, 17 bp, Arabidopsis thaliana
catcctgtagatcgatc

SEQ ID NO: 174611 - DNA, 17 bp, Arabidopsis thaliana
catcctgtagatggata

SEQ ID NO: 174612 - DNA, 17 bp, Arabidopsis thaliana
catcctgtagatggatc

SEQ ID NO: 174613 - DNA, 17 bp, Arabidopsis thaliana
catcctgtagatggatg

SEQ ID NO: 174614 - DNA, 17 bp, Arabidopsis thaliana
catcctgtaggtggatc

SEQ ID NO: 174615 - DNA, 17 bp, Arabidopsis thaliana
catccttcgatgtcggc

SEQ ID NO: 174616 - DNA, 17 bp, Arabidopsis thaliana
catcctttgctgatgcg

SEQ ID NO: 174617 - DNA, 17 bp, Arabidopsis thaliana
catcgaactacctacca

SEQ ID NO: 174618 - DNA, 17 bp, Arabidopsis thaliana
catcgaccgatcctgat

SEQ ID NO: 174619 - DNA, 17 bp, Arabidopsis thaliana
catcgagtaggcttatt

SEQ ID NO: 174620 - DNA, 17 bp, Arabidopsis thaliana
catcgatgggtgagaac

SEQ ID NO: 174621 - DNA, 17 bp, Arabidopsis thaliana
catcgcacggccttgcg

SEQ ID NO: 174622 - DNA, 17 bp, Arabidopsis thaliana
catcggccagcctataa

SEQ ID NO: 174623 - DNA, 17 bp, Arabidopsis thaliana
catcgtgatggggatag

SEQ ID NO: 174624 - DNA, 17 bp, Arabidopsis thaliana
catctaaaggatgcgac

SEQ ID NO: 174625 - DNA, 17 bp, Arabidopsis thaliana
catctaagtgcgacgaa

SEQ ID NO: 174626 - DNA, 17 bp, Arabidopsis thaliana
catctacagaatacgac

SEQ ID NO: 174627 - DNA, 17 bp, Arabidopsis thaliana
catctacagaatgcgac

SEQ ID NO: 174628 - DNA, 17 bp, Arabidopsis thaliana
catctacagatgcgact

SEQ ID NO: 174629 - DNA, 17 bp, Arabidopsis thaliana
catctacagatgcgaga

SEQ ID NO: 174630 - DNA, 17 bp, Arabidopsis thaliana
catctacagatgcgagt

SEQ ID NO: 174631 - DNA, 17 bp, Arabidopsis thaliana
catctacagatgcggat

SEQ ID NO: 174632 - DNA, 17 bp, Arabidopsis thaliana
catctacaggaagcgac

SEQ ID NO: 174633 - DNA, 17 bp, Arabidopsis thaliana
catctacaggagcgaga

SEQ ID NO: 174634 - DNA, 17 bp, Arabidopsis thaliana
catctacaggagctccc

SEQ ID NO: 174635 - DNA, 17 bp, Arabidopsis thaliana
catctacaggaggcgac

SEQ ID NO: 174636 - DNA, 17 bp, Arabidopsis thaliana
catctacaggatacgga

SEQ ID NO: 174637 - DNA, 17 bp, Arabidopsis thaliana
catctacaggatcgact

SEQ ID NO: 174638 - DNA, 17 bp, Arabidopsis thaliana
catctacaggatgagac

SEQ ID NO: 174639 - DNA, 17 bp, Arabidopsis thaliana
catctacaggatgatcc

SEQ ID NO: 174640 - DNA, 17 bp, Arabidopsis thaliana
catctacaggatgcaac

SEQ ID NO: 174641 - DNA, 17 bp, Arabidopsis thaliana
catctacaggatgcaat

SEQ ID NO: 174642 - DNA, 17 bp, Arabidopsis thaliana
catctacaggatgcatg

SEQ ID NO: 174643 - DNA, 17 bp, Arabidopsis thaliana
catctacaggatgcgaa

SEQ ID NO: 174644 - DNA, 17 bp, Arabidopsis thaliana
catctacaggatgcgac

SEQ ID NO: 174645 - DNA, 17 bp, Arabidopsis thaliana
catctacaggatgcgag

SEQ ID NO: 174646 - DNA, 17 bp, Arabidopsis thaliana
catctacaggatgcgat

SEQ ID NO: 174647 - DNA, 17 bp, Arabidopsis thaliana
catctacaggatgcgca

SEQ ID NO: 174648 - DNA, 17 bp, Arabidopsis thaliana
catctacaggatgcgct

SEQ ID NO: 174649 - DNA, 17 bp, Arabidopsis thaliana
catctacaggatgcgga

SEQ ID NO: 174650 - DNA, 17 bp, Arabidopsis thaliana
catctacaggatgcggc

SEQ ID NO: 174651 - DNA, 17 bp, Arabidopsis thaliana
catctacaggatgcgta

SEQ ID NO: 174652 - DNA, 17 bp, Arabidopsis thaliana
catctacaggatgcgtg

SEQ ID NO: 174653 - DNA, 17 bp, Arabidopsis thaliana
catctacaggatggact

SEQ ID NO: 174654 - DNA, 17 bp, Arabidopsis thaliana
catctacaggatggatc

SEQ ID NO: 174655 - DNA, 17 bp, Arabidopsis thaliana
catctacaggatgtgac

SEQ ID NO: 174656 - DNA, 17 bp, Arabidopsis thaliana
catctacaggattgcga

SEQ ID NO: 174657 - DNA, 17 bp, Arabidopsis thaliana
catctacaggctgcgac

SEQ ID NO: 174658 - DNA, 17 bp, Arabidopsis thaliana
catctacagggcgacta

SEQ ID NO: 174659 - DNA, 17 bp, Arabidopsis thaliana
catctacagggcgagat

SEQ ID NO: 174660 - DNA, 17 bp, Arabidopsis thaliana
catctacagggtgcaga

SEQ ID NO: 174661 - DNA, 17 bp, Arabidopsis thaliana
catctacagggtgcgac

SEQ ID NO: 174662 - DNA, 17 bp, Arabidopsis thaliana
catctacagggtgcgga

SEQ ID NO: 174663 - DNA, 17 bp, Arabidopsis thaliana
catctacaggtgcgact

SEQ ID NO: 174664 - DNA, 17 bp, Arabidopsis thaliana
catctacagtgcgactg

SEQ ID NO: 174665 - DNA, 17 bp, Arabidopsis thaliana
catctacagtgcgagat

SEQ ID NO: 174666 - DNA, 17 bp, Arabidopsis thaliana
catctacctttggtgat

SEQ ID NO: 174667 - DNA, 17 bp, Arabidopsis thaliana
catctacgatccatctg

SEQ ID NO: 174668 - DNA, 17 bp, Arabidopsis thaliana
catctacggatgcgacg

SEQ ID NO: 174669 - DNA, 17 bp, Arabidopsis thaliana
catctacggatgcgact

SEQ ID NO: 174670 - DNA, 17 bp, Arabidopsis thaliana
catctacgggacgcgac

SEQ ID NO: 174671 - DNA, 17 bp, Arabidopsis thaliana
catctacgggatgcgga

SEQ ID NO: 174672 - DNA, 17 bp, Arabidopsis thaliana
catctacgtcggtaagg

SEQ ID NO: 174673 - DNA, 17 bp, Arabidopsis thaliana
catctactggatgcgac

SEQ ID NO: 174674 - DNA, 17 bp, Arabidopsis thaliana
catctacttacacttaa

SEQ ID NO: 174675 - DNA, 17 bp, Arabidopsis thaliana
catctagttagatatga

SEQ ID NO: 174676 - DNA, 17 bp, Arabidopsis thaliana
catctagttagatatta

SEQ ID NO: 174677 - DNA, 17 bp, Arabidopsis thaliana
catctataggatgcgac

SEQ ID NO: 174678 - DNA, 17 bp, Arabidopsis thaliana
catctcaggatgcaact

SEQ ID NO: 174679 - DNA, 17 bp, Arabidopsis thaliana
catctcaggatgcgact

SEQ ID NO: 174680 - DNA, 17 bp, Arabidopsis thaliana
catctcaggatgcggat

SEQ ID NO: 174681 - DNA, 17 bp, Arabidopsis thaliana
catctccaaggtctcgt

SEQ ID NO: 174682 - DNA, 17 bp, Arabidopsis thaliana
catctccagcgaccgca

SEQ ID NO: 174683 - DNA, 17 bp, Arabidopsis thaliana
catctccaggatgcgac

SEQ ID NO: 174684 - DNA, 17 bp, Arabidopsis thaliana
catctccaggatggact

SEQ ID NO: 174685 - DNA, 17 bp, Arabidopsis thaliana
catctcccataaaagga

SEQ ID NO: 174686 - DNA, 17 bp, Arabidopsis thaliana
catctcccataaaaggg

SEQ ID NO: 174687 - DNA, 17 bp, Arabidopsis thaliana
catctcgcggaagagtt

SEQ ID NO: 174688 - DNA, 17 bp, Arabidopsis thaliana
catctgaccaggagttg

SEQ ID NO: 174689 - DNA, 17 bp, Arabidopsis thaliana
catctgacctctgtttt

SEQ ID NO: 174690 - DNA, 17 bp, Arabidopsis thaliana
catctgagctacatccc

SEQ ID NO: 174691 - DNA, 17 bp, Arabidopsis thaliana
catctgcagatgaagaa

SEQ ID NO: 174692 - DNA, 17 bp, Arabidopsis thaliana
catctgcagatgaagac

SEQ ID NO: 174693 - DNA, 17 bp, Arabidopsis thaliana
catctgcagatgcgact

SEQ ID NO: 174694 - DNA, 17 bp, Arabidopsis thaliana
catctgcaggatgcgac

SEQ ID NO: 174695 - DNA, 17 bp, Arabidopsis thaliana
catctgctccggtgtca

SEQ ID NO: 174696 - DNA, 17 bp, Arabidopsis thaliana
catctggacggcagatc

SEQ ID NO: 174697 - DNA, 17 bp, Arabidopsis thaliana
catctggaggatgcgac

SEQ ID NO: 174698 - DNA, 17 bp, Arabidopsis thaliana
catctgggacaacagga

SEQ ID NO: 174699 - DNA, 17 bp, Arabidopsis thaliana
catctggtctaatacct

SEQ ID NO: 174700 - DNA, 17 bp, Arabidopsis thaliana
catctgttttttttttt

SEQ ID NO: 174701 - DNA, 17 bp, Arabidopsis thaliana
catcttactagttcttc

SEQ ID NO: 174702 - DNA, 17 bp, Arabidopsis thaliana
catcttcaggatgcgac

SEQ ID NO: 174703 - DNA, 17 bp, Arabidopsis thaliana
catcttcgtcggattcg

SEQ ID NO: 174704 - DNA, 17 bp, Arabidopsis thaliana
catcttgagattgtaag

SEQ ID NO: 174705 - DNA, 17 bp, Arabidopsis thaliana
catctttggatttccat

SEQ ID NO: 174706 - DNA, 17 bp, Arabidopsis thaliana
catcttttgctgatgcg

SEQ ID NO: 174707 - DNA, 17 bp, Arabidopsis thaliana
catcttttgcttttgtg

SEQ ID NO: 174708 - DNA, 17 bp, Arabidopsis thaliana
catgaactttgatttta

SEQ ID NO: 174709 - DNA, 17 bp, Arabidopsis thaliana
catgaccattatctgtc

SEQ ID NO: 174710 - DNA, 17 bp, Arabidopsis thaliana
catgacttgaactcatg

SEQ ID NO: 174711 - DNA, 17 bp, Arabidopsis thaliana
catgagatgctactctg

SEQ ID NO: 174712 - DNA, 17 bp, Arabidopsis thaliana
catgataactcgacgga

SEQ ID NO: 174713 - DNA, 17 bp, Arabidopsis thaliana
catgatgaggattgttt

SEQ ID NO: 174714 - DNA, 17 bp, Arabidopsis thaliana
catgattagggacaatg

SEQ ID NO: 174715 - DNA, 17 bp, Arabidopsis thaliana
catgcaccaccaccgac

SEQ ID NO: 174716 - DNA, 17 bp, Arabidopsis thaliana
catgcaccaccaccgat

SEQ ID NO: 174717 - DNA, 17 bp, Arabidopsis thaliana
catgccagcaacagaac

SEQ ID NO: 174718 - DNA, 17 bp, Arabidopsis thaliana
catgcccgcggcttctc

SEQ ID NO: 174719 - DNA, 17 bp, Arabidopsis thaliana
catgcctctctcttgga

SEQ ID NO: 174720 - DNA, 17 bp, Arabidopsis thaliana
catgcctgtcgggaccc

SEQ ID NO: 174721 - DNA, 17 bp, Arabidopsis thaliana
catgccttgctcgagca

SEQ ID NO: 174722 - DNA, 17 bp, Arabidopsis thaliana
catgcgcccgccgcccg

SEQ ID NO: 174723 - DNA, 17 bp, Arabidopsis thaliana
catgcgcgggttcaatt

SEQ ID NO: 174724 - DNA, 17 bp, Arabidopsis thaliana
catgcgtcgcttctagc

SEQ ID NO: 174725 - DNA, 17 bp, Arabidopsis thaliana
catgctaagactcacca

SEQ ID NO: 174726 - DNA, 17 bp, Arabidopsis thaliana
catgctaatcttctctg

SEQ ID NO: 174727 - DNA, 17 bp, Arabidopsis thaliana
catgctgaccgaggcga

SEQ ID NO: 174728 - DNA, 17 bp, Arabidopsis thaliana
catgctgccatcttgag

SEQ ID NO: 174729 - DNA, 17 bp, Arabidopsis thaliana
catgctttcattgtgag

SEQ ID NO: 174730 - DNA, 17 bp, Arabidopsis thaliana
catggactttttcgcca

SEQ ID NO: 174731 - DNA, 17 bp, Arabidopsis thaliana
catggactttttcttca

SEQ ID NO: 174732 - DNA, 17 bp, Arabidopsis thaliana
catggagcagccacaga

SEQ ID NO: 174733 - DNA, 17 bp, Arabidopsis thaliana
catggatccggcgggca

SEQ ID NO: 174734 - DNA, 17 bp, Arabidopsis thaliana
catggcagtgaggacgg

SEQ ID NO: 174735 - DNA, 17 bp, Arabidopsis thaliana
catggcccatctgctgt

SEQ ID NO: 174736 - DNA, 17 bp, Arabidopsis thaliana
catggccgttcttactt

SEQ ID NO: 174737 - DNA, 17 bp, Arabidopsis thaliana
catggccgttcttagtt

SEQ ID NO: 174738 - DNA, 17 bp, Arabidopsis thaliana
catggcctctgtgctgg

SEQ ID NO: 174739 - DNA, 17 bp, Arabidopsis thaliana
catggctgagtgatcct

SEQ ID NO: 174740 - DNA, 17 bp, Arabidopsis thaliana
catgggataacatcata

SEQ ID NO: 174741 - DNA, 17 bp, Arabidopsis thaliana
catgggttagtcgatcc

SEQ ID NO: 174742 - DNA, 17 bp, Arabidopsis thaliana
catgggttggtcgatcc

SEQ ID NO: 174743 - DNA, 17 bp, Arabidopsis thaliana
catggtcctgcattttg

SEQ ID NO: 174744 - DNA, 17 bp, Arabidopsis thaliana
catggtcgactcgtgaa

SEQ ID NO: 174745 - DNA, 17 bp, Arabidopsis thaliana
catggtgagggacgacg

SEQ ID NO: 174746 - DNA, 17 bp, Arabidopsis thaliana
catgtaaacaaaaacat

SEQ ID NO: 174747 - DNA, 17 bp, Arabidopsis thaliana
catgtacttagcaggaa

SEQ ID NO: 174748 - DNA, 17 bp, Arabidopsis thaliana
catgtacttagcaggca

SEQ ID NO: 174749 - DNA, 17 bp, Arabidopsis thaliana
catgtcagagtccgttc

SEQ ID NO: 174750 - DNA, 17 bp, Arabidopsis thaliana
catgtcgcatctgtaga

SEQ ID NO: 174751 - DNA, 17 bp, Arabidopsis thaliana
catgtcgtaatagtagt

SEQ ID NO: 174752 - DNA, 17 bp, Arabidopsis thaliana
catgtgcaaatgctttc

SEQ ID NO: 174753 - DNA, 17 bp, Arabidopsis thaliana
catgtgcccatcttcac

SEQ ID NO: 174754 - DNA, 17 bp, Arabidopsis thaliana
catgttcggaagcaggc

SEQ ID NO: 174755 - DNA, 17 bp, Arabidopsis thaliana
catgtttttgcggagga

SEQ ID NO: 174756 - DNA, 17 bp, Arabidopsis thaliana
cattacaagtaaactgg

SEQ ID NO: 174757 - DNA, 17 bp, Arabidopsis thaliana
cattacaggatgcgact

SEQ ID NO: 174758 - DNA, 17 bp, Arabidopsis thaliana
cattacccgcaggattg

SEQ ID NO: 174759 - DNA, 17 bp, Arabidopsis thaliana
cattagaatttgatgct

SEQ ID NO: 174760 - DNA, 17 bp, Arabidopsis thaliana
cattatttgtggcagag

SEQ ID NO: 174761 - DNA, 17 bp, Arabidopsis thaliana
cattcaatcggtaggag

SEQ ID NO: 174762 - DNA, 17 bp, Arabidopsis thaliana
cattcagagcactgggc

SEQ ID NO: 174763 - DNA, 17 bp, Arabidopsis thaliana
cattcatattgttccgc

SEQ ID NO: 174764 - DNA, 17 bp, Arabidopsis thaliana
cattcatctagttagat

SEQ ID NO: 174765 - DNA, 17 bp, Arabidopsis thaliana
cattcattccggacatc

SEQ ID NO: 174766 - DNA, 17 bp, Arabidopsis thaliana
cattcctcacccgtgag

SEQ ID NO: 174767 - DNA, 17 bp, Arabidopsis thaliana
cattcgcagtttcacag

SEQ ID NO: 174768 - DNA, 17 bp, Arabidopsis thaliana
cattctcgcttggggtg

SEQ ID NO: 174769 - DNA, 17 bp, Arabidopsis thaliana
cattctgcaagtgacga

SEQ ID NO: 174770 - DNA, 17 bp, Arabidopsis thaliana
cattctgccatacgccg

SEQ ID NO: 174771 - DNA, 17 bp, Arabidopsis thaliana
cattctggaacaagcca

SEQ ID NO: 174772 - DNA, 17 bp, Arabidopsis thaliana
cattctggaacaagccc

SEQ ID NO: 174773 - DNA, 17 bp, Arabidopsis thaliana
cattctgtagatggatc

SEQ ID NO: 174774 - DNA, 17 bp, Arabidopsis thaliana
cattgaaaatgtgcctg

SEQ ID NO: 174775 - DNA, 17 bp, Arabidopsis thaliana
cattgacgagagaacta

SEQ ID NO: 174776 - DNA, 17 bp, Arabidopsis thaliana
cattgacgagagaactt

SEQ ID NO: 174777 - DNA, 17 bp, Arabidopsis thaliana
cattgccctccactgca

SEQ ID NO: 174778 - DNA, 17 bp, Arabidopsis thaliana
cattgcgatggtccctg

SEQ ID NO: 174779 - DNA, 17 bp, Arabidopsis thaliana
cattgcggctttgcgga

SEQ ID NO: 174780 - DNA, 17 bp, Arabidopsis thaliana
cattgcgtattcgggag

SEQ ID NO: 174781 - DNA, 17 bp, Arabidopsis thaliana
cattggagggcaagtca

SEQ ID NO: 174782 - DNA, 17 bp, Arabidopsis thaliana
cattggagggcaagtct

SEQ ID NO: 174783 - DNA, 17 bp, Arabidopsis thaliana
cattggcataactaaga

SEQ ID NO: 174784 - DNA, 17 bp, Arabidopsis thaliana
cattggtcggcttgtcc

SEQ ID NO: 174785 - DNA, 17 bp, Arabidopsis thaliana
cattgtcaggtggactc

SEQ ID NO: 174786 - DNA, 17 bp, Arabidopsis thaliana
cattgtcaggtggggag

SEQ ID NO: 174787 - DNA, 17 bp, Arabidopsis thaliana
cattgtccattgacgag

SEQ ID NO: 174788 - DNA, 17 bp, Arabidopsis thaliana
cattgtcccgggctgcc

SEQ ID NO: 174789 - DNA, 17 bp, Arabidopsis thaliana
cattgtgaagcagaatt

SEQ ID NO: 174790 - DNA, 17 bp, Arabidopsis thaliana
cattgttccttggctgc

SEQ ID NO: 174791 - DNA, 17 bp, Arabidopsis thaliana
catttacaggatgcgac

SEQ ID NO: 174792 - DNA, 17 bp, Arabidopsis thaliana
catttaccagtatctta

SEQ ID NO: 174793 - DNA, 17 bp, Arabidopsis thaliana
catttaccagtatgtta

SEQ ID NO: 174794 - DNA, 17 bp, Arabidopsis thaliana
catttacctaattcgta

SEQ ID NO: 174795 - DNA, 17 bp, Arabidopsis thaliana
catttcccggctggtgc

SEQ ID NO: 174796 - DNA, 17 bp, Arabidopsis thaliana
catttcgcggaagagtt

SEQ ID NO: 174797 - DNA, 17 bp, Arabidopsis thaliana
catttctaggcaggagt

SEQ ID NO: 174798 - DNA, 17 bp, Arabidopsis thaliana
catttctcggaacgccc

SEQ ID NO: 174799 - DNA, 17 bp, Arabidopsis thaliana
catttctcggaatgccc

SEQ ID NO: 174800 - DNA, 17 bp, Arabidopsis thaliana
catttgagctacatccc

SEQ ID NO: 174801 - DNA, 17 bp, Arabidopsis thaliana
catttgccaaggatgta

SEQ ID NO: 174802 - DNA, 17 bp, Arabidopsis thaliana
catttgccaaggatgtt

SEQ ID NO: 174803 - DNA, 17 bp, Arabidopsis thaliana
catttgcttcatggact

SEQ ID NO: 174804 - DNA, 17 bp, Arabidopsis thaliana
catttgggcggcaggca

SEQ ID NO: 174805 - DNA, 17 bp, Arabidopsis thaliana
catttggtctaattcct

SEQ ID NO: 174806 - DNA, 17 bp, Arabidopsis thaliana
cattttaaactctccgg

SEQ ID NO: 174807 - DNA, 17 bp, Arabidopsis thaliana
cattttatgtttaggta

SEQ ID NO: 174808 - DNA, 17 bp, Arabidopsis thaliana
cattttcagatccattt

SEQ ID NO: 174809 - DNA, 17 bp, Arabidopsis thaliana
cattttcattcattgtt

SEQ ID NO: 174810 - DNA, 17 bp, Arabidopsis thaliana
cattttcgacggcatta

SEQ ID NO: 174811 - DNA, 17 bp, Arabidopsis thaliana
cattttgtacctgagga

SEQ ID NO: 174812 - DNA, 17 bp, Arabidopsis thaliana
cattttgttatttggat

SEQ ID NO: 174813 - DNA, 17 bp, Arabidopsis thaliana
cattttgttatttggtt

SEQ ID NO: 174814 - DNA, 17 bp, Arabidopsis thaliana
cattttgttatttgttt

SEQ ID NO: 174815 - DNA, 17 bp, Arabidopsis thaliana
catttttggtaagcaga

SEQ ID NO: 174816 - DNA, 17 bp, Arabidopsis thaliana
ccaaaaaaaattgttgc

SEQ ID NO: 174817 - DNA, 17 bp, Arabidopsis thaliana
ccaaaacagaacgaccc

SEQ ID NO: 174818 - DNA, 17 bp, Arabidopsis thaliana
ccaaaacccagccattg

SEQ ID NO: 174819 - DNA, 17 bp, Arabidopsis thaliana
ccaaaacccggtggata

SEQ ID NO: 174820 - DNA, 17 bp, Arabidopsis thaliana
ccaaaaccgagccattg

SEQ ID NO: 174821 - DNA, 17 bp, Arabidopsis thaliana
ccaaactgggattgcta

SEQ ID NO: 174822 - DNA, 17 bp, Arabidopsis thaliana
ccaaagacccgcggact

SEQ ID NO: 174823 - DNA, 17 bp, Arabidopsis thaliana
ccaaagttgtaaatgta

SEQ ID NO: 174824 - DNA, 17 bp, Arabidopsis thaliana
ccaaagttgtaaatgtg

SEQ ID NO: 174825 - DNA, 17 bp, Arabidopsis thaliana
ccaaatggctgggtttt

SEQ ID NO: 174826 - DNA, 17 bp, Arabidopsis thaliana
ccaacaacattgatgtc

SEQ ID NO: 174827 - DNA, 17 bp, Arabidopsis thaliana
ccaacaagggattgaag

SEQ ID NO: 174828 - DNA, 17 bp, Arabidopsis thaliana
ccaacaataggctatat

SEQ ID NO: 174829 - DNA, 17 bp, Arabidopsis thaliana
ccaacatagcgttcgat

SEQ ID NO: 174830 - DNA, 17 bp, Arabidopsis thaliana
ccaacctgcatgggcca

SEQ ID NO: 174831 - DNA, 17 bp, Arabidopsis thaliana
ccaaccttagctcagtt

SEQ ID NO: 174832 - DNA, 17 bp, Arabidopsis thaliana
ccaacgcggattacggt

SEQ ID NO: 174833 - DNA, 17 bp, Arabidopsis thaliana
ccaacgcgttatcaacc

SEQ ID NO: 174834 - DNA, 17 bp, Arabidopsis thaliana
ccaacgggtcctaacgc

SEQ ID NO: 174835 - DNA, 17 bp, Arabidopsis thaliana
ccaacgtttactatgct

SEQ ID NO: 174836 - DNA, 17 bp, Arabidopsis thaliana
ccaactaagaacggcca

SEQ ID NO: 174837 - DNA, 17 bp, Arabidopsis thaliana
ccaagcaatagacccgg

SEQ ID NO: 174838 - DNA, 17 bp, Arabidopsis thaliana
ccaagcgcgggtaaacg

SEQ ID NO: 174839 - DNA, 17 bp, Arabidopsis thaliana
ccaaggaaggcagcagg

SEQ ID NO: 174840 - DNA, 17 bp, Arabidopsis thaliana
ccaaggaaggcagtagg

SEQ ID NO: 174841 - DNA, 17 bp, Arabidopsis thaliana
ccaaggagtctgacatg

SEQ ID NO: 174842 - DNA, 17 bp, Arabidopsis thaliana
ccaaggatgttttcacc

SEQ ID NO: 174843 - DNA, 17 bp, Arabidopsis thaliana
ccaaggatgttttcata

SEQ ID NO: 174844 - DNA, 17 bp, Arabidopsis thaliana
ccaaggatgttttcatt

SEQ ID NO: 174845 - DNA, 17 bp, Arabidopsis thaliana
ccaaggtagcagcggca

SEQ ID NO: 174846 - DNA, 17 bp, Arabidopsis thaliana
ccaaggtcgtggtcaag

SEQ ID NO: 174847 - DNA, 17 bp, Arabidopsis thaliana
ccaataagtctattgga

SEQ ID NO: 174848 - DNA, 17 bp, Arabidopsis thaliana
ccaataagttctctcgt

SEQ ID NO: 174849 - DNA, 17 bp, Arabidopsis thaliana
ccaatcaaacaaccaag

SEQ ID NO: 174850 - DNA, 17 bp, Arabidopsis thaliana
ccaatgatgccaatgac

SEQ ID NO: 174851 - DNA, 17 bp, Arabidopsis thaliana
ccaatgccgtaggttca

SEQ ID NO: 174852 - DNA, 17 bp, Arabidopsis thaliana
ccaatgcgcctttttct

SEQ ID NO: 174853 - DNA, 17 bp, Arabidopsis thaliana
ccaatggcatcagttat

SEQ ID NO: 174854 - DNA, 17 bp, Arabidopsis thaliana
ccaatgtcttttctagt

SEQ ID NO: 174855 - DNA, 17 bp, Arabidopsis thaliana
ccaattgtgcgaatcaa

SEQ ID NO: 174856 - DNA, 17 bp, Arabidopsis thaliana
ccacaaacttgatcgct

SEQ ID NO: 174857 - DNA, 17 bp, Arabidopsis thaliana
ccacaaagggtgttggt

SEQ ID NO: 174858 - DNA, 17 bp, Arabidopsis thaliana
ccacaatcaatattgcg

SEQ ID NO: 174859 - DNA, 17 bp, Arabidopsis thaliana
ccacaccgcttttatca

SEQ ID NO: 174860 - DNA, 17 bp, Arabidopsis thaliana
ccacagaggctcagtcc

SEQ ID NO: 174861 - DNA, 17 bp, Arabidopsis thaliana
ccacagcttcggaagct

SEQ ID NO: 174862 - DNA, 17 bp, Arabidopsis thaliana
ccacaggccgacgcccg

SEQ ID NO: 174863 - DNA, 17 bp, Arabidopsis thaliana
ccacagggataactggc

SEQ ID NO: 174864 - DNA, 17 bp, Arabidopsis thaliana
ccacatgaagtcttaag

SEQ ID NO: 174865 - DNA, 17 bp, Arabidopsis thaliana
ccaccaaccttctgcca

SEQ ID NO: 174866 - DNA, 17 bp, Arabidopsis thaliana
ccaccaactaagaacca

SEQ ID NO: 174867 - DNA, 17 bp, Arabidopsis thaliana
ccaccaagagtccacca

SEQ ID NO: 174868 - DNA, 17 bp, Arabidopsis thaliana
ccaccaagcagtccaca

SEQ ID NO: 174869 - DNA, 17 bp, Arabidopsis thaliana
ccaccaagcagtccacg

SEQ ID NO: 174870 - DNA, 17 bp, Arabidopsis thaliana
ccaccaggagtggagcc

SEQ ID NO: 174871 - DNA, 17 bp, Arabidopsis thaliana
ccacccgcctgtgccgt

SEQ ID NO: 174872 - DNA, 17 bp, Arabidopsis thaliana
ccaccctggaaacggct

SEQ ID NO: 174873 - DNA, 17 bp, Arabidopsis thaliana
ccaccgccagctgtcaa

SEQ ID NO: 174874 - DNA, 17 bp, Arabidopsis thaliana
ccaccgcccagtcttgc

SEQ ID NO: 174875 - DNA, 17 bp, Arabidopsis thaliana
ccaccgccggttccagt

SEQ ID NO: 174876 - DNA, 17 bp, Arabidopsis thaliana
ccacctgacaatgtcct

SEQ ID NO: 174877 - DNA, 17 bp, Arabidopsis thaliana
ccacgatccaccgagat

SEQ ID NO: 174878 - DNA, 17 bp, Arabidopsis thaliana
ccacgatccactgagat

SEQ ID NO: 174879 - DNA, 17 bp, Arabidopsis thaliana
ccacgatccactgggat

SEQ ID NO: 174880 - DNA, 17 bp, Arabidopsis thaliana
ccacgatcctctgagat

SEQ ID NO: 174881 - DNA, 17 bp, Arabidopsis thaliana
ccacgctaagtggcata

SEQ ID NO: 174882 - DNA, 17 bp, Arabidopsis thaliana
ccacggtgccactccta

SEQ ID NO: 174883 - DNA, 17 bp, Arabidopsis thaliana
ccacgtcgccgcgatcc

SEQ ID NO: 174884 - DNA, 17 bp, Arabidopsis thaliana
ccacgtggcagttatcg

SEQ ID NO: 174885 - DNA, 17 bp, Arabidopsis thaliana
ccactcgtcttcttgat

SEQ ID NO: 174886 - DNA, 17 bp, Arabidopsis thaliana
ccactgagattcagcca

SEQ ID NO: 174887 - DNA, 17 bp, Arabidopsis thaliana
ccactgagattcagccc

SEQ ID NO: 174888 - DNA, 17 bp, Arabidopsis thaliana
ccactgctgagagcggg

SEQ ID NO: 174889 - DNA, 17 bp, Arabidopsis thaliana
ccactgcttctgaagca

SEQ ID NO: 174890 - DNA, 17 bp, Arabidopsis thaliana
ccactgcttctgaagct

SEQ ID NO: 174891 - DNA, 17 bp, Arabidopsis thaliana
ccactgcttttctatgg

SEQ ID NO: 174892 - DNA, 17 bp, Arabidopsis thaliana
ccactgtccctgtctac

SEQ ID NO: 174893 - DNA, 17 bp, Arabidopsis thaliana
ccacttttgtggactat

SEQ ID NO: 174894 - DNA, 17 bp, Arabidopsis thaliana
ccagaaggatgataaaa

SEQ ID NO: 174895 - DNA, 17 bp, Arabidopsis thaliana
ccagaaggatgataaag

SEQ ID NO: 174896 - DNA, 17 bp, Arabidopsis thaliana
ccagaaggcttgggcgc

SEQ ID NO: 174897 - DNA, 17 bp, Arabidopsis thaliana
ccagacaaatcgctcca

SEQ ID NO: 174898 - DNA, 17 bp, Arabidopsis thaliana
ccagaccagttggagcg

SEQ ID NO: 174899 - DNA, 17 bp, Arabidopsis thaliana
ccagagagggtcgaacg

SEQ ID NO: 174900 - DNA, 17 bp, Arabidopsis thaliana
ccagaggcttgtgaccc

SEQ ID NO: 174901 - DNA, 17 bp, Arabidopsis thaliana
ccagatatcttcccagg

SEQ ID NO: 174902 - DNA, 17 bp, Arabidopsis thaliana
ccagcacagaggccatg

SEQ ID NO: 174903 - DNA, 17 bp, Arabidopsis thaliana
ccagcacctgattgccg

SEQ ID NO: 174904 - DNA, 17 bp, Arabidopsis thaliana
ccagcacctggttgccg

SEQ ID NO: 174905 - DNA, 17 bp, Arabidopsis thaliana
ccagcagccgcggtaat

SEQ ID NO: 174906 - DNA, 17 bp, Arabidopsis thaliana
ccagccaaactcgatcc

SEQ ID NO: 174907 - DNA, 17 bp, Arabidopsis thaliana
ccagccatgtgtcagtt

SEQ ID NO: 174908 - DNA, 17 bp, Arabidopsis thaliana
ccagccatttgggttct

SEQ ID NO: 174909 - DNA, 17 bp, Arabidopsis thaliana
ccagccgactgcgcaag

SEQ ID NO: 174910 - DNA, 17 bp, Arabidopsis thaliana
ccagccgattgcgcaaa

SEQ ID NO: 174911 - DNA, 17 bp, Arabidopsis thaliana
ccagcgacctgggttcg

SEQ ID NO: 174912 - DNA, 17 bp, Arabidopsis thaliana
ccagcggagttctataa

SEQ ID NO: 174913 - DNA, 17 bp, Arabidopsis thaliana
ccagcggctggaagagc

SEQ ID NO: 174914 - DNA, 17 bp, Arabidopsis thaliana
ccagcgttgcgctcaat

SEQ ID NO: 174915 - DNA, 17 bp, Arabidopsis thaliana
ccagctacatcttgctt

SEQ ID NO: 174916 - DNA, 17 bp, Arabidopsis thaliana
ccagctatcctgaggga

SEQ ID NO: 174917 - DNA, 17 bp, Arabidopsis thaliana
ccagctgggactgagga

SEQ ID NO: 174918 - DNA, 17 bp, Arabidopsis thaliana
ccagcttcatcgaacaa

SEQ ID NO: 174919 - DNA, 17 bp, Arabidopsis thaliana
ccaggagacccaggttc

SEQ ID NO: 174920 - DNA, 17 bp, Arabidopsis thaliana
ccaggagacccgggttc

SEQ ID NO: 174921 - DNA, 17 bp, Arabidopsis thaliana
ccaggagacctgggttc

SEQ ID NO: 174922 - DNA, 17 bp, Arabidopsis thaliana
ccaggagcgtatcgccg

SEQ ID NO: 174923 - DNA, 17 bp, Arabidopsis thaliana
ccaggattacaagaagg

SEQ ID NO: 174924 - DNA, 17 bp, Arabidopsis thaliana
ccaggcctcgatgagta

SEQ ID NO: 174925 - DNA, 17 bp, Arabidopsis thaliana
ccaggctcaggaatcga

SEQ ID NO: 174926 - DNA, 17 bp, Arabidopsis thaliana
ccagggatcagcggatg

SEQ ID NO: 174927 - DNA, 17 bp, Arabidopsis thaliana
ccagggcttgacatgcc

SEQ ID NO: 174928 - DNA, 17 bp, Arabidopsis thaliana
ccagggggagtatggtc

SEQ ID NO: 174929 - DNA, 17 bp, Arabidopsis thaliana
ccaggtaaggtattcag

SEQ ID NO: 174930 - DNA, 17 bp, Arabidopsis thaliana
ccaggtccagacatagt

SEQ ID NO: 174931 - DNA, 17 bp, Arabidopsis thaliana
ccaggtgagcgagtcgg

SEQ ID NO: 174932 - DNA, 17 bp, Arabidopsis thaliana
ccaggtgggcggtatac

SEQ ID NO: 174933 - DNA, 17 bp, Arabidopsis thaliana
ccaggttgcagtagcag

SEQ ID NO: 174934 - DNA, 17 bp, Arabidopsis thaliana
ccagtaacgaagtatac

SEQ ID NO: 174935 - DNA, 17 bp, Arabidopsis thaliana
ccagtacagtgtctcgt

SEQ ID NO: 174936 - DNA, 17 bp, Arabidopsis thaliana
ccagtatcttatgcgtc

SEQ ID NO: 174937 - DNA, 17 bp, Arabidopsis thaliana
ccagtatgttatgcgcc

SEQ ID NO: 174938 - DNA, 17 bp, Arabidopsis thaliana
ccagtatgttatgcgtc

SEQ ID NO: 174939 - DNA, 17 bp, Arabidopsis thaliana
ccagtatgttatgcttc

SEQ ID NO: 174940 - DNA, 17 bp, Arabidopsis thaliana
ccagtcacagagcttgg

SEQ ID NO: 174941 - DNA, 17 bp, Arabidopsis thaliana
ccagtccaagctgagag

SEQ ID NO: 174942 - DNA, 17 bp, Arabidopsis thaliana
ccagtggctgtccttca

SEQ ID NO: 174943 - DNA, 17 bp, Arabidopsis thaliana
ccagttaccacgcagtt

SEQ ID NO: 174944 - DNA, 17 bp, Arabidopsis thaliana
ccagttaccatgcagtt

SEQ ID NO: 174945 - DNA, 17 bp, Arabidopsis thaliana
ccagttccgaacccgtc

SEQ ID NO: 174946 - DNA, 17 bp, Arabidopsis thaliana
ccagtttcaccaagcca

SEQ ID NO: 174947 - DNA, 17 bp, Arabidopsis thaliana
ccataaacgatgccgac

SEQ ID NO: 174948 - DNA, 17 bp, Arabidopsis thaliana
ccataaccttaaccttg

SEQ ID NO: 174949 - DNA, 17 bp, Arabidopsis thaliana
ccataacgagatcctta

SEQ ID NO: 174950 - DNA, 17 bp, Arabidopsis thaliana
ccataagtaaccagata

SEQ ID NO: 174951 - DNA, 17 bp, Arabidopsis thaliana
ccataagtaaccagatc

SEQ ID NO: 174952 - DNA, 17 bp, Arabidopsis thaliana
ccatacaaccacgagat

SEQ ID NO: 174953 - DNA, 17 bp, Arabidopsis thaliana
ccatactccattttgcg

SEQ ID NO: 174954 - DNA, 17 bp, Arabidopsis thaliana
ccatagtgtgacgggcg

SEQ ID NO: 174955 - DNA, 17 bp, Arabidopsis thaliana
ccatatgccgataacaa

SEQ ID NO: 174956 - DNA, 17 bp, Arabidopsis thaliana
ccatcagagtgtatcta

SEQ ID NO: 174957 - DNA, 17 bp, Arabidopsis thaliana
ccatccataccccgccc

SEQ ID NO: 174958 - DNA, 17 bp, Arabidopsis thaliana
ccatcccatttaccagt

SEQ ID NO: 174959 - DNA, 17 bp, Arabidopsis thaliana
ccatccgtctcagtaaa

SEQ ID NO: 174960 - DNA, 17 bp, Arabidopsis thaliana
ccatcctgtagatggat

SEQ ID NO: 174961 - DNA, 17 bp, Arabidopsis thaliana
ccatccttggatgtggt

SEQ ID NO: 174962 - DNA, 17 bp, Arabidopsis thaliana
ccatcctttgctgatgc

SEQ ID NO: 174963 - DNA, 17 bp, Arabidopsis thaliana
ccatcgagtctcttgaa

SEQ ID NO: 174964 - DNA, 17 bp, Arabidopsis thaliana
ccatcgctcataggtac

SEQ ID NO: 174965 - DNA, 17 bp, Arabidopsis thaliana
ccatcgctcataggttc

SEQ ID NO: 174966 - DNA, 17 bp, Arabidopsis thaliana
ccatctccggcatttgc

SEQ ID NO: 174967 - DNA, 17 bp, Arabidopsis thaliana
ccatcttctcttgagat

SEQ ID NO: 174968 - DNA, 17 bp, Arabidopsis thaliana
ccatcttgagattgtaa

SEQ ID NO: 174969 - DNA, 17 bp, Arabidopsis thaliana
ccatgaccaccgtcctg

SEQ ID NO: 174970 - DNA, 17 bp, Arabidopsis thaliana
ccatggtcttaaggatt

SEQ ID NO: 174971 - DNA, 17 bp, Arabidopsis thaliana
ccattagctcagttgga

SEQ ID NO: 174972 - DNA, 17 bp, Arabidopsis thaliana
ccattcgatcaactaac

SEQ ID NO: 174973 - DNA, 17 bp, Arabidopsis thaliana
ccattgacgagagaact

SEQ ID NO: 174974 - DNA, 17 bp, Arabidopsis thaliana
ccattggagggcaagta

SEQ ID NO: 174975 - DNA, 17 bp, Arabidopsis thaliana
ccattggagggcaagtc

SEQ ID NO: 174976 - DNA, 17 bp, Arabidopsis thaliana
ccattgtcgtccagcgg

SEQ ID NO: 174977 - DNA, 17 bp, Arabidopsis thaliana
ccattgttccttggctg

SEQ ID NO: 174978 - DNA, 17 bp, Arabidopsis thaliana
ccatttaccagtatctt

SEQ ID NO: 174979 - DNA, 17 bp, Arabidopsis thaliana
ccatttaccagtatgtt

SEQ ID NO: 174980 - DNA, 17 bp, Arabidopsis thaliana
ccatttctaagcttctt

SEQ ID NO: 174981 - DNA, 17 bp, Arabidopsis thaliana
ccatttttggtaagcag

SEQ ID NO: 174982 - DNA, 17 bp, Arabidopsis thaliana
cccaaaaggagtcgagg

SEQ ID NO: 174983 - DNA, 17 bp, Arabidopsis thaliana
cccaaaataggaacggg

SEQ ID NO: 174984 - DNA, 17 bp, Arabidopsis thaliana
cccaaaattaaccattg

SEQ ID NO: 174985 - DNA, 17 bp, Arabidopsis thaliana
cccaaagggatcgcatt

SEQ ID NO: 174986 - DNA, 17 bp, Arabidopsis thaliana
cccaaagttcgcaggag

SEQ ID NO: 174987 - DNA, 17 bp, Arabidopsis thaliana
cccaagacaagcttaca

SEQ ID NO: 174988 - DNA, 17 bp, Arabidopsis thaliana
cccaagacaagcttagg

SEQ ID NO: 174989 - DNA, 17 bp, Arabidopsis thaliana
cccaagccttctggccg

SEQ ID NO: 174990 - DNA, 17 bp, Arabidopsis thaliana
cccaagcgaatgatgaa

SEQ ID NO: 174991 - DNA, 17 bp, Arabidopsis thaliana
cccaagcgaatgatgat

SEQ ID NO: 174992 - DNA, 17 bp, Arabidopsis thaliana
cccaagtaggatttgaa

SEQ ID NO: 174993 - DNA, 17 bp, Arabidopsis thaliana
cccaatcctgacacggg

SEQ ID NO: 174994 - DNA, 17 bp, Arabidopsis thaliana
cccacaaacttgatcgc

SEQ ID NO: 174995 - DNA, 17 bp, Arabidopsis thaliana
cccacaaacttggtcgc

SEQ ID NO: 174996 - DNA, 17 bp, Arabidopsis thaliana
cccacaaagggtgttgg

SEQ ID NO: 174997 - DNA, 17 bp, Arabidopsis thaliana
cccaccaatagggaacg

SEQ ID NO: 174998 - DNA, 17 bp, Arabidopsis thaliana
cccaccctggaaacggc

SEQ ID NO: 174999 - DNA, 17 bp, Arabidopsis thaliana
cccacctgacaatgtcc

SEQ ID NO: 175000 - DNA, 17 bp, Arabidopsis thaliana
cccacgagtatggacag

SEQ ID NO: 175001 - DNA, 17 bp, Arabidopsis thaliana
cccacggtgccactcct

SEQ ID NO: 175002 - DNA, 17 bp, Arabidopsis thaliana
cccagattaggtcgctg

SEQ ID NO: 175003 - DNA, 17 bp, Arabidopsis thaliana
cccagcagatttttact

SEQ ID NO: 175004 - DNA, 17 bp, Arabidopsis thaliana
cccagttccgaacccgt

SEQ ID NO: 175005 - DNA, 17 bp, Arabidopsis thaliana
cccatacaaccacgaga

SEQ ID NO: 175006 - DNA, 17 bp, Arabidopsis thaliana
cccatatgccgataaca

SEQ ID NO: 175007 - DNA, 17 bp, Arabidopsis thaliana
cccatcagtgtgacaga

SEQ ID NO: 175008 - DNA, 17 bp, Arabidopsis thaliana
cccatcagtgtgacagg

SEQ ID NO: 175009 - DNA, 17 bp, Arabidopsis thaliana
cccatcggggagtgaaa

SEQ ID NO: 175010 - DNA, 17 bp, Arabidopsis thaliana
cccatgtgcaagtgccg

SEQ ID NO: 175011 - DNA, 17 bp, Arabidopsis thaliana
cccattgtcgctaagat

SEQ ID NO: 175012 - DNA, 17 bp, Arabidopsis thaliana
cccatttcgtcgatttg

SEQ ID NO: 175013 - DNA, 17 bp, Arabidopsis thaliana
ccccaaatgtagacaaa

SEQ ID NO: 175014 - DNA, 17 bp, Arabidopsis thaliana
ccccaggtcaggcggga

SEQ ID NO: 175015 - DNA, 17 bp, Arabidopsis thaliana
cccccatcggggagtga

SEQ ID NO: 175016 - DNA, 17 bp, Arabidopsis thaliana
cccccgactcttaggaa

SEQ ID NO: 175017 - DNA, 17 bp, Arabidopsis thaliana
ccccctacctggcgccc

SEQ ID NO: 175018 - DNA, 17 bp, Arabidopsis thaliana
cccccttacaatgtcga

SEQ ID NO: 175019 - DNA, 17 bp, Arabidopsis thaliana
ccccctttgtacacacc

SEQ ID NO: 175020 - DNA, 17 bp, Arabidopsis thaliana
ccccgaaaatggatgca

SEQ ID NO: 175021 - DNA, 17 bp, Arabidopsis thaliana
ccccgaaaatggatggc

SEQ ID NO: 175022 - DNA, 17 bp, Arabidopsis thaliana
ccccgaattctcggatc

SEQ ID NO: 175023 - DNA, 17 bp, Arabidopsis thaliana
ccccgctgattctgcca

SEQ ID NO: 175024 - DNA, 17 bp, Arabidopsis thaliana
ccccggcggggaccgac

SEQ ID NO: 175025 - DNA, 17 bp, Arabidopsis thaliana
ccccgggcgtcgaacag

SEQ ID NO: 175026 - DNA, 17 bp, Arabidopsis thaliana
ccccgggggggcgtttc

SEQ ID NO: 175027 - DNA, 17 bp, Arabidopsis thaliana
ccccgtatggtaggacg

SEQ ID NO: 175028 - DNA, 17 bp, Arabidopsis thaliana
ccccgtcgtgcccggac

SEQ ID NO: 175029 - DNA, 17 bp, Arabidopsis thaliana
cccctaactagctacgt

SEQ ID NO: 175030 - DNA, 17 bp, Arabidopsis thaliana
cccctgcgcaaggatga

SEQ ID NO: 175031 - DNA, 17 bp, Arabidopsis thaliana
cccctttggatgtcgtc

SEQ ID NO: 175032 - DNA, 17 bp, Arabidopsis thaliana
cccctttttcggttcgg

SEQ ID NO: 175033 - DNA, 17 bp, Arabidopsis thaliana
cccgaaaatggatggcg

SEQ ID NO: 175034 - DNA, 17 bp, Arabidopsis thaliana
cccgaaaccgacacagg

SEQ ID NO: 175035 - DNA, 17 bp, Arabidopsis thaliana
cccgaaagcgagtaaag

SEQ ID NO: 175036 - DNA, 17 bp, Arabidopsis thaliana
cccgaacccggcccaac

SEQ ID NO: 175037 - DNA, 17 bp, Arabidopsis thaliana
cccgaacccggcccaat

SEQ ID NO: 175038 - DNA, 17 bp, Arabidopsis thaliana
cccgaagatgaagaccc

SEQ ID NO: 175039 - DNA, 17 bp, Arabidopsis thaliana
cccgaatcgatcggcgg

SEQ ID NO: 175040 - DNA, 17 bp, Arabidopsis thaliana
cccgaccttagctcagt

SEQ ID NO: 175041 - DNA, 17 bp, Arabidopsis thaliana
cccgacttatggaagga

SEQ ID NO: 175042 - DNA, 17 bp, Arabidopsis thaliana
cccgacttggaatgggc

SEQ ID NO: 175043 - DNA, 17 bp, Arabidopsis thaliana
cccgagagagccgttcc

SEQ ID NO: 175044 - DNA, 17 bp, Arabidopsis thaliana
cccgatagaactcgcgt

SEQ ID NO: 175045 - DNA, 17 bp, Arabidopsis thaliana
cccgatagtaattcaac

SEQ ID NO: 175046 - DNA, 17 bp, Arabidopsis thaliana
cccgattgccgaccccc

SEQ ID NO: 175047 - DNA, 17 bp, Arabidopsis thaliana
cccgattgccgaccctc

SEQ ID NO: 175048 - DNA, 17 bp, Arabidopsis thaliana
cccgcagcgatactgac

SEQ ID NO: 175049 - DNA, 17 bp, Arabidopsis thaliana
cccgcatgggattcgag

SEQ ID NO: 175050 - DNA, 17 bp, Arabidopsis thaliana
cccgccgcccgattgcc

SEQ ID NO: 175051 - DNA, 17 bp, Arabidopsis thaliana
cccgccttgcatcaact

SEQ ID NO: 175052 - DNA, 17 bp, Arabidopsis thaliana
cccgcgacgtcgcgaga

SEQ ID NO: 175053 - DNA, 17 bp, Arabidopsis thaliana
cccgctgattctgccaa

SEQ ID NO: 175054 - DNA, 17 bp, Arabidopsis thaliana
cccggagacggagtgtg

SEQ ID NO: 175055 - DNA, 17 bp, Arabidopsis thaliana
cccggagcacgctgatg

SEQ ID NO: 175056 - DNA, 17 bp, Arabidopsis thaliana
cccggcaagctcaggaa

SEQ ID NO: 175057 - DNA, 17 bp, Arabidopsis thaliana
cccggcggggaccgacg

SEQ ID NO: 175058 - DNA, 17 bp, Arabidopsis thaliana
cccggtactcttaccta

SEQ ID NO: 175059 - DNA, 17 bp, Arabidopsis thaliana
cccggtcgtactcataa

SEQ ID NO: 175060 - DNA, 17 bp, Arabidopsis thaliana
cccggtgggggtgaagg

SEQ ID NO: 175061 - DNA, 17 bp, Arabidopsis thaliana
cccgtatggtaggacgc

SEQ ID NO: 175062 - DNA, 17 bp, Arabidopsis thaliana
cccgtcagaccgccgtg

SEQ ID NO: 175063 - DNA, 17 bp, Arabidopsis thaliana
cccgtcgaacagggacg

SEQ ID NO: 175064 - DNA, 17 bp, Arabidopsis thaliana
cccgtcttgtaacacgg

SEQ ID NO: 175065 - DNA, 17 bp, Arabidopsis thaliana
cccgtggaagaaaataa

SEQ ID NO: 175066 - DNA, 17 bp, Arabidopsis thaliana
cccgtggaagaaaatca

SEQ ID NO: 175067 - DNA, 17 bp, Arabidopsis thaliana
cccgtgtcaggattggg

SEQ ID NO: 175068 - DNA, 17 bp, Arabidopsis thaliana
cccgttaggtggctttg

SEQ ID NO: 175069 - DNA, 17 bp, Arabidopsis thaliana
cccgttcccttggctgt

SEQ ID NO: 175070 - DNA, 17 bp, Arabidopsis thaliana
cccgttgctctgatgaa

SEQ ID NO: 175071 - DNA, 17 bp, Arabidopsis thaliana
cccgttgctctgatgat

SEQ ID NO: 175072 - DNA, 17 bp, Arabidopsis thaliana
ccctaaattaatcatag

SEQ ID NO: 175073 - DNA, 17 bp, Arabidopsis thaliana
ccctaacgttgccgtca

SEQ ID NO: 175074 - DNA, 17 bp, Arabidopsis thaliana
ccctaagttccggtgtc

SEQ ID NO: 175075 - DNA, 17 bp, Arabidopsis thaliana
ccctacacgggtcgttt

SEQ ID NO: 175076 - DNA, 17 bp, Arabidopsis thaliana
ccctacgctactggcgc

SEQ ID NO: 175077 - DNA, 17 bp, Arabidopsis thaliana
ccctactgatgcccccg

SEQ ID NO: 175078 - DNA, 17 bp, Arabidopsis thaliana
ccctactgatgcccgcg

SEQ ID NO: 175079 - DNA, 17 bp, Arabidopsis thaliana
ccctactgatgccgcgt

SEQ ID NO: 175080 - DNA, 17 bp, Arabidopsis thaliana
ccctatcaaccttcgac

SEQ ID NO: 175081 - DNA, 17 bp, Arabidopsis thaliana
ccctattagtaggccca

SEQ ID NO: 175082 - DNA, 17 bp, Arabidopsis thaliana
ccctattggtgggtgaa

SEQ ID NO: 175083 - DNA, 17 bp, Arabidopsis thaliana
ccctattggtttgatcg

SEQ ID NO: 175084 - DNA, 17 bp, Arabidopsis thaliana
ccctcaccatcctttgc

SEQ ID NO: 175085 - DNA, 17 bp, Arabidopsis thaliana
ccctccactgcaagaac

SEQ ID NO: 175086 - DNA, 17 bp, Arabidopsis thaliana
ccctccaggtgagcgag

SEQ ID NO: 175087 - DNA, 17 bp, Arabidopsis thaliana
ccctctaagaagccagc

SEQ ID NO: 175088 - DNA, 17 bp, Arabidopsis thaliana
ccctctaagaagccggc

SEQ ID NO: 175089 - DNA, 17 bp, Arabidopsis thaliana
ccctcttgcatcgtcca

SEQ ID NO: 175090 - DNA, 17 bp, Arabidopsis thaliana
ccctcttgcatcgtccc

SEQ ID NO: 175091 - DNA, 17 bp, Arabidopsis thaliana
ccctgaggaaagccggg

SEQ ID NO: 175092 - DNA, 17 bp, Arabidopsis thaliana
ccctgccctttgtacac

SEQ ID NO: 175093 - DNA, 17 bp, Arabidopsis thaliana
ccctgcgcaaggatgaa

SEQ ID NO: 175094 - DNA, 17 bp, Arabidopsis thaliana
ccctgcgcaaggatgac

SEQ ID NO: 175095 - DNA, 17 bp, Arabidopsis thaliana
ccctgtagaaagattta

SEQ ID NO: 175096 - DNA, 17 bp, Arabidopsis thaliana
ccctgtagaaagatttt

SEQ ID NO: 175097 - DNA, 17 bp, Arabidopsis thaliana
ccctgtctactatccag

SEQ ID NO: 175098 - DNA, 17 bp, Arabidopsis thaliana
ccctgttgagcttgact

SEQ ID NO: 175099 - DNA, 17 bp, Arabidopsis thaliana
cccttagatgttctggg

SEQ ID NO: 175100 - DNA, 17 bp, Arabidopsis thaliana
cccttagatgttctgtc

SEQ ID NO: 175101 - DNA, 17 bp, Arabidopsis thaliana
cccttatgggctgggcc

SEQ ID NO: 175102 - DNA, 17 bp, Arabidopsis thaliana
cccttcacgaccggctt

SEQ ID NO: 175103 - DNA, 17 bp, Arabidopsis thaliana
cccttcacggccggctt

SEQ ID NO: 175104 - DNA, 17 bp, Arabidopsis thaliana
cccttccgggggggccc

SEQ ID NO: 175105 - DNA, 17 bp, Arabidopsis thaliana
cccttcggtcggcgata

SEQ ID NO: 175106 - DNA, 17 bp, Arabidopsis thaliana
cccttctcatcgatggt

SEQ ID NO: 175107 - DNA, 17 bp, Arabidopsis thaliana
cccttgcagcatctgtt

SEQ ID NO: 175108 - DNA, 17 bp, Arabidopsis thaliana
cccttggtttttgcttt

SEQ ID NO: 175109 - DNA, 17 bp, Arabidopsis thaliana
ccctttcgaagttcgcg

SEQ ID NO: 175110 - DNA, 17 bp, Arabidopsis thaliana
ccctttctacattgtca

SEQ ID NO: 175111 - DNA, 17 bp, Arabidopsis thaliana
ccctttctagtctgcgc

SEQ ID NO: 175112 - DNA, 17 bp, Arabidopsis thaliana
ccctttgagacatctcg

SEQ ID NO: 175113 - DNA, 17 bp, Arabidopsis thaliana
ccctttgatattggcct

SEQ ID NO: 175114 - DNA, 17 bp, Arabidopsis thaliana
ccctttgtacacaccga

SEQ ID NO: 175115 - DNA, 17 bp, Arabidopsis thaliana
ccctttgtacacaccgc

SEQ ID NO: 175116 - DNA, 17 bp, Arabidopsis thaliana
ccctttgtcgctaagat

SEQ ID NO: 175117 - DNA, 17 bp, Arabidopsis thaliana
ccctttgtcgctgagat

SEQ ID NO: 175118 - DNA, 17 bp, Arabidopsis thaliana
ccgaaaatggatggcgc

SEQ ID NO: 175119 - DNA, 17 bp, Arabidopsis thaliana
ccgaaacaaaatttcta

SEQ ID NO: 175120 - DNA, 17 bp, Arabidopsis thaliana
ccgaaagatggtgaact

SEQ ID NO: 175121 - DNA, 17 bp, Arabidopsis thaliana
ccgaacacggggttaag

SEQ ID NO: 175122 - DNA, 17 bp, Arabidopsis thaliana
ccgaaccatctagtagc

SEQ ID NO: 175123 - DNA, 17 bp, Arabidopsis thaliana
ccgaacgacgcttccgc

SEQ ID NO: 175124 - DNA, 17 bp, Arabidopsis thaliana
ccgaacgcggggttaag

SEQ ID NO: 175125 - DNA, 17 bp, Arabidopsis thaliana
ccgaactacgaagtcca

SEQ ID NO: 175126 - DNA, 17 bp, Arabidopsis thaliana
ccgaagcgagccttggg

SEQ ID NO: 175127 - DNA, 17 bp, Arabidopsis thaliana
ccgaagggacaagccga

SEQ ID NO: 175128 - DNA, 17 bp, Arabidopsis thaliana
ccgaagggcataactaa

SEQ ID NO: 175129 - DNA, 17 bp, Arabidopsis thaliana
ccgacaatcctgcgggt

SEQ ID NO: 175130 - DNA, 17 bp, Arabidopsis thaliana
ccgacaccggaacttcg

SEQ ID NO: 175131 - DNA, 17 bp, Arabidopsis thaliana
ccgacacggattacgga

SEQ ID NO: 175132 - DNA, 17 bp, Arabidopsis thaliana
ccgacacggattacggt

SEQ ID NO: 175133 - DNA, 17 bp, Arabidopsis thaliana
ccgacactaatgtagct

SEQ ID NO: 175134 - DNA, 17 bp, Arabidopsis thaliana
ccgacaggcccgggtaa

SEQ ID NO: 175135 - DNA, 17 bp, Arabidopsis thaliana
ccgaccagggatcagcg

SEQ ID NO: 175136 - DNA, 17 bp, Arabidopsis thaliana
ccgacccgcaccaagcg

SEQ ID NO: 175137 - DNA, 17 bp, Arabidopsis thaliana
ccgaccctcagtaggag

SEQ ID NO: 175138 - DNA, 17 bp, Arabidopsis thaliana
ccgaccgaagggacaag

SEQ ID NO: 175139 - DNA, 17 bp, Arabidopsis thaliana
ccgaccgagccagtttt

SEQ ID NO: 175140 - DNA, 17 bp, Arabidopsis thaliana
ccgacctgcaccaagca

SEQ ID NO: 175141 - DNA, 17 bp, Arabidopsis thaliana
ccgacctgcaccaagcg

SEQ ID NO: 175142 - DNA, 17 bp, Arabidopsis thaliana
ccgaccttaactcagta

SEQ ID NO: 175143 - DNA, 17 bp, Arabidopsis thaliana
ccgaccttaactcagtt

SEQ ID NO: 175144 - DNA, 17 bp, Arabidopsis thaliana
ccgaccttagcacagtt

SEQ ID NO: 175145 - DNA, 17 bp, Arabidopsis thaliana
ccgaccttagcccagtt

SEQ ID NO: 175146 - DNA, 17 bp, Arabidopsis thaliana
ccgaccttagctcagta

SEQ ID NO: 175147 - DNA, 17 bp, Arabidopsis thaliana
ccgaccttagctcagtg

SEQ ID NO: 175148 - DNA, 17 bp, Arabidopsis thaliana
ccgaccttagctcagtt

SEQ ID NO: 175149 - DNA, 17 bp, Arabidopsis thaliana
ccgacgaccagattgga

SEQ ID NO: 175150 - DNA, 17 bp, Arabidopsis thaliana
ccgacgcagattacggt

SEQ ID NO: 175151 - DNA, 17 bp, Arabidopsis thaliana
ccgacgcggacggtggc

SEQ ID NO: 175152 - DNA, 17 bp, Arabidopsis thaliana
ccgacgcggatcacggt

SEQ ID NO: 175153 - DNA, 17 bp, Arabidopsis thaliana
ccgacgcggattacaga

SEQ ID NO: 175154 - DNA, 17 bp, Arabidopsis thaliana
ccgacgcggattacagt

SEQ ID NO: 175155 - DNA, 17 bp, Arabidopsis thaliana
ccgacgcggattaccgt

SEQ ID NO: 175156 - DNA, 17 bp, Arabidopsis thaliana
ccgacgcggattacgat

SEQ ID NO: 175157 - DNA, 17 bp, Arabidopsis thaliana
ccgacgcggattacgga

SEQ ID NO: 175158 - DNA, 17 bp, Arabidopsis thaliana
ccgacgcggattacggc

SEQ ID NO: 175159 - DNA, 17 bp, Arabidopsis thaliana
ccgacgcggattacggt

SEQ ID NO: 175160 - DNA, 17 bp, Arabidopsis thaliana
ccgacgcggattacgtt

SEQ ID NO: 175161 - DNA, 17 bp, Arabidopsis thaliana
ccgacgcggattactgt

SEQ ID NO: 175162 - DNA, 17 bp, Arabidopsis thaliana
ccgacgcggattatgga

SEQ ID NO: 175163 - DNA, 17 bp, Arabidopsis thaliana
ccgacgcggattgcggt

SEQ ID NO: 175164 - DNA, 17 bp, Arabidopsis thaliana
ccgacgcgggttacggt

SEQ ID NO: 175165 - DNA, 17 bp, Arabidopsis thaliana
ccgacgctgattacggt

SEQ ID NO: 175166 - DNA, 17 bp, Arabidopsis thaliana
ccgacgggctaattgat

SEQ ID NO: 175167 - DNA, 17 bp, Arabidopsis thaliana
ccgacggggattacgga

SEQ ID NO: 175168 - DNA, 17 bp, Arabidopsis thaliana
ccgacggggattacggt

SEQ ID NO: 175169 - DNA, 17 bp, Arabidopsis thaliana
ccgactagttgatgatt

SEQ ID NO: 175170 - DNA, 17 bp, Arabidopsis thaliana
ccgactgtcggtccact

SEQ ID NO: 175171 - DNA, 17 bp, Arabidopsis thaliana
ccgacttatggaaggaa

SEQ ID NO: 175172 - DNA, 17 bp, Arabidopsis thaliana
ccgacttatggaaggga

SEQ ID NO: 175173 - DNA, 17 bp, Arabidopsis thaliana
ccgacttatggaagtga

SEQ ID NO: 175174 - DNA, 17 bp, Arabidopsis thaliana
ccgactttagctcagtt

SEQ ID NO: 175175 - DNA, 17 bp, Arabidopsis thaliana
ccgactttgtgaaatga

SEQ ID NO: 175176 - DNA, 17 bp, Arabidopsis thaliana
ccgagaccgatggaagc

SEQ ID NO: 175177 - DNA, 17 bp, Arabidopsis thaliana
ccgagagacccgggttc

SEQ ID NO: 175178 - DNA, 17 bp, Arabidopsis thaliana
ccgagccagtgttccac

SEQ ID NO: 175179 - DNA, 17 bp, Arabidopsis thaliana
ccgagccagttttgaaa

SEQ ID NO: 175180 - DNA, 17 bp, Arabidopsis thaliana
ccgagcggcgggtagaa

SEQ ID NO: 175181 - DNA, 17 bp, Arabidopsis thaliana
ccgaggaatcgtcgacc

SEQ ID NO: 175182 - DNA, 17 bp, Arabidopsis thaliana
ccgaggcttgagggttg

SEQ ID NO: 175183 - DNA, 17 bp, Arabidopsis thaliana
ccgagggcacgtctgcc

SEQ ID NO: 175184 - DNA, 17 bp, Arabidopsis thaliana
ccgagggcacgtctgct

SEQ ID NO: 175185 - DNA, 17 bp, Arabidopsis thaliana
ccgagtgccgctcacgc

SEQ ID NO: 175186 - DNA, 17 bp, Arabidopsis thaliana
ccgataaacctctgcat

SEQ ID NO: 175187 - DNA, 17 bp, Arabidopsis thaliana
ccgatcctgagccatag

SEQ ID NO: 175188 - DNA, 17 bp, Arabidopsis thaliana
ccgatcgattcggggcg

SEQ ID NO: 175189 - DNA, 17 bp, Arabidopsis thaliana
ccgatgacgtccagcgg

SEQ ID NO: 175190 - DNA, 17 bp, Arabidopsis thaliana
ccgatgcggattacggt

SEQ ID NO: 175191 - DNA, 17 bp, Arabidopsis thaliana
ccgatgcgggttacggt

SEQ ID NO: 175192 - DNA, 17 bp, Arabidopsis thaliana
ccgatgggcttggagac

SEQ ID NO: 175193 - DNA, 17 bp, Arabidopsis thaliana
ccgatgtcgtccagcgg

SEQ ID NO: 175194 - DNA, 17 bp, Arabidopsis thaliana
ccgattcctgcagggcc

SEQ ID NO: 175195 - DNA, 17 bp, Arabidopsis thaliana
ccgattccttgcccgcc

SEQ ID NO: 175196 - DNA, 17 bp, Arabidopsis thaliana
ccgattgaatgatccgg

SEQ ID NO: 175197 - DNA, 17 bp, Arabidopsis thaliana
ccgattgaatggtccgg

SEQ ID NO: 175198 - DNA, 17 bp, Arabidopsis thaliana
ccgattgccgaccctca

SEQ ID NO: 175199 - DNA, 17 bp, Arabidopsis thaliana
ccgatttatctgcaaca

SEQ ID NO: 175200 - DNA, 17 bp, Arabidopsis thaliana
ccgatttatggctttcc

SEQ ID NO: 175201 - DNA, 17 bp, Arabidopsis thaliana
ccgcaacaacggactca

SEQ ID NO: 175202 - DNA, 17 bp, Arabidopsis thaliana
ccgcaacaacggactcg

SEQ ID NO: 175203 - DNA, 17 bp, Arabidopsis thaliana
ccgcaccattgcactaa

SEQ ID NO: 175204 - DNA, 17 bp, Arabidopsis thaliana
ccgcagcaggtctccaa

SEQ ID NO: 175205 - DNA, 17 bp, Arabidopsis thaliana
ccgcagcctcaaccacc

SEQ ID NO: 175206 - DNA, 17 bp, Arabidopsis thaliana
ccgcagcgatactgacg

SEQ ID NO: 175207 - DNA, 17 bp, Arabidopsis thaliana
ccgcaggctccactcct

SEQ ID NO: 175208 - DNA, 17 bp, Arabidopsis thaliana
ccgcagttaagcgtgct

SEQ ID NO: 175209 - DNA, 17 bp, Arabidopsis thaliana
ccgcatagcattgcaca

SEQ ID NO: 175210 - DNA, 17 bp, Arabidopsis thaliana
ccgccaatcagcttcct

SEQ ID NO: 175211 - DNA, 17 bp, Arabidopsis thaliana
ccgcccagcgggatgcc

SEQ ID NO: 175212 - DNA, 17 bp, Arabidopsis thaliana
ccgcccgattgccaacc

SEQ ID NO: 175213 - DNA, 17 bp, Arabidopsis thaliana
ccgcccgattgccgacc

SEQ ID NO: 175214 - DNA, 17 bp, Arabidopsis thaliana
ccgcccggatcgacccg

SEQ ID NO: 175215 - DNA, 17 bp, Arabidopsis thaliana
ccgcccggttcaggcca

SEQ ID NO: 175216 - DNA, 17 bp, Arabidopsis thaliana
ccgcccgtcgctcctac

SEQ ID NO: 175217 - DNA, 17 bp, Arabidopsis thaliana
ccgccgaacggacttag

SEQ ID NO: 175218 - DNA, 17 bp, Arabidopsis thaliana
ccgccgaagcgagcctt

SEQ ID NO: 175219 - DNA, 17 bp, Arabidopsis thaliana
ccgccgacgtccgtgat

SEQ ID NO: 175220 - DNA, 17 bp, Arabidopsis thaliana
ccgccgacgtctccgga

SEQ ID NO: 175221 - DNA, 17 bp, Arabidopsis thaliana
ccgccgcccgattgccg

SEQ ID NO: 175222 - DNA, 17 bp, Arabidopsis thaliana
ccgccgcctgcgtttag

SEQ ID NO: 175223 - DNA, 17 bp, Arabidopsis thaliana
ccgccgctcggtgattc

SEQ ID NO: 175224 - DNA, 17 bp, Arabidopsis thaliana
ccgccgtgcgaccaccc

SEQ ID NO: 175225 - DNA, 17 bp, Arabidopsis thaliana
ccgcctgacctggggcc

SEQ ID NO: 175226 - DNA, 17 bp, Arabidopsis thaliana
ccgcctgacctggggtc

SEQ ID NO: 175227 - DNA, 17 bp, Arabidopsis thaliana
ccgccttgcatcaactg

SEQ ID NO: 175228 - DNA, 17 bp, Arabidopsis thaliana
ccgcgaatccgacaggt

SEQ ID NO: 175229 - DNA, 17 bp, Arabidopsis thaliana
ccgcgacgatacctccc

SEQ ID NO: 175230 - DNA, 17 bp, Arabidopsis thaliana
ccgcgacgtcgcgagaa

SEQ ID NO: 175231 - DNA, 17 bp, Arabidopsis thaliana
ccgcgacgtcgcgagag

SEQ ID NO: 175232 - DNA, 17 bp, Arabidopsis thaliana
ccgcgatagtaattcaa

SEQ ID NO: 175233 - DNA, 17 bp, Arabidopsis thaliana
ccgcgccatgtaacgcc

SEQ ID NO: 175234 - DNA, 17 bp, Arabidopsis thaliana
ccgcgcttcggcaagga

SEQ ID NO: 175235 - DNA, 17 bp, Arabidopsis thaliana
ccgcggaagcagctcga

SEQ ID NO: 175236 - DNA, 17 bp, Arabidopsis thaliana
ccgcggcgagagcgggt

SEQ ID NO: 175237 - DNA, 17 bp, Arabidopsis thaliana
ccgcggctgctggcacc

SEQ ID NO: 175238 - DNA, 17 bp, Arabidopsis thaliana
ccgcggcttctccttcg

SEQ ID NO: 175239 - DNA, 17 bp, Arabidopsis thaliana
ccgcggtaattccagct

SEQ ID NO: 175240 - DNA, 17 bp, Arabidopsis thaliana
ccgcgtgaggctggttt

SEQ ID NO: 175241 - DNA, 17 bp, Arabidopsis thaliana
ccgcgtgccggccgggg

SEQ ID NO: 175242 - DNA, 17 bp, Arabidopsis thaliana
ccgctaaggagtgtgta

SEQ ID NO: 175243 - DNA, 17 bp, Arabidopsis thaliana
ccgctacactgcttatc

SEQ ID NO: 175244 - DNA, 17 bp, Arabidopsis thaliana
ccgctccgattggacca

SEQ ID NO: 175245 - DNA, 17 bp, Arabidopsis thaliana
ccgctcgccagatacga

SEQ ID NO: 175246 - DNA, 17 bp, Arabidopsis thaliana
ccgctgacagccgacgg

SEQ ID NO: 175247 - DNA, 17 bp, Arabidopsis thaliana
ccgctgatccctggtcg

SEQ ID NO: 175248 - DNA, 17 bp, Arabidopsis thaliana
ccgctgattctgccaag

SEQ ID NO: 175249 - DNA, 17 bp, Arabidopsis thaliana
ccgctggtccctggtcg

SEQ ID NO: 175250 - DNA, 17 bp, Arabidopsis thaliana
ccgcttggtgcaggtcg

SEQ ID NO: 175251 - DNA, 17 bp, Arabidopsis thaliana
ccggaagggtgctatgc

SEQ ID NO: 175252 - DNA, 17 bp, Arabidopsis thaliana
ccggaatcaacgaagca

SEQ ID NO: 175253 - DNA, 17 bp, Arabidopsis thaliana
ccggaatcaacgaagcc

SEQ ID NO: 175254 - DNA, 17 bp, Arabidopsis thaliana
ccggacaccagactgca

SEQ ID NO: 175255 - DNA, 17 bp, Arabidopsis thaliana
ccggaccaggcttcatc

SEQ ID NO: 175256 - DNA, 17 bp, Arabidopsis thaliana
ccggaccaggcttcatt

SEQ ID NO: 175257 - DNA, 17 bp, Arabidopsis thaliana
ccggactagcagttgtt

SEQ ID NO: 175258 - DNA, 17 bp, Arabidopsis thaliana
ccggagacgtcggcggg

SEQ ID NO: 175259 - DNA, 17 bp, Arabidopsis thaliana
ccggagagggagcctga

SEQ ID NO: 175260 - DNA, 17 bp, Arabidopsis thaliana
ccggagatagggttcag

SEQ ID NO: 175261 - DNA, 17 bp, Arabidopsis thaliana
ccggaggaccgagtgcc

SEQ ID NO: 175262 - DNA, 17 bp, Arabidopsis thaliana
ccggaggatggatggtc

SEQ ID NO: 175263 - DNA, 17 bp, Arabidopsis thaliana
ccggaggtagggtccag

SEQ ID NO: 175264 - DNA, 17 bp, Arabidopsis thaliana
ccggagttgtggaatcc

SEQ ID NO: 175265 - DNA, 17 bp, Arabidopsis thaliana
ccggcaagctcaggaac

SEQ ID NO: 175266 - DNA, 17 bp, Arabidopsis thaliana
ccggcaagttgaccttg

SEQ ID NO: 175267 - DNA, 17 bp, Arabidopsis thaliana
ccggcacgcggcgaccc

SEQ ID NO: 175268 - DNA, 17 bp, Arabidopsis thaliana
ccggccagcagagtgtt

SEQ ID NO: 175269 - DNA, 17 bp, Arabidopsis thaliana
ccggccgaccctcacct

SEQ ID NO: 175270 - DNA, 17 bp, Arabidopsis thaliana
ccggccgggggacggac

SEQ ID NO: 175271 - DNA, 17 bp, Arabidopsis thaliana
ccggcgaaaaccgatgg

SEQ ID NO: 175272 - DNA, 17 bp, Arabidopsis thaliana
ccggcgaccgaagcccc

SEQ ID NO: 175273 - DNA, 17 bp, Arabidopsis thaliana
ccggcgaggtagtgacg

SEQ ID NO: 175274 - DNA, 17 bp, Arabidopsis thaliana
ccggcgatgcgtcctgg

SEQ ID NO: 175275 - DNA, 17 bp, Arabidopsis thaliana
ccggcgccccttgaaaa

SEQ ID NO: 175276 - DNA, 17 bp, Arabidopsis thaliana
ccggcggaccaggttgc

SEQ ID NO: 175277 - DNA, 17 bp, Arabidopsis thaliana
ccggcgggcaaggaatc

SEQ ID NO: 175278 - DNA, 17 bp, Arabidopsis thaliana
ccggcggtggtgcggct

SEQ ID NO: 175279 - DNA, 17 bp, Arabidopsis thaliana
ccggctagttgaccttg

SEQ ID NO: 175280 - DNA, 17 bp, Arabidopsis thaliana
ccggctcggatgctcaa

SEQ ID NO: 175281 - DNA, 17 bp, Arabidopsis thaliana
ccggctcgtccggttcg

SEQ ID NO: 175282 - DNA, 17 bp, Arabidopsis thaliana
ccggctgagaatggtgc

SEQ ID NO: 175283 - DNA, 17 bp, Arabidopsis thaliana
ccggctgagccgtttcc

SEQ ID NO: 175284 - DNA, 17 bp, Arabidopsis thaliana
ccggctggcgggatact

SEQ ID NO: 175285 - DNA, 17 bp, Arabidopsis thaliana
ccggcttcttagaggga

SEQ ID NO: 175286 - DNA, 17 bp, Arabidopsis thaliana
ccgggaagtcctcgtgt

SEQ ID NO: 175287 - DNA, 17 bp, Arabidopsis thaliana
ccgggacaaagggtcgc

SEQ ID NO: 175288 - DNA, 17 bp, Arabidopsis thaliana
ccgggacgtggcggtgg

SEQ ID NO: 175289 - DNA, 17 bp, Arabidopsis thaliana
ccgggacgtggcggttg

SEQ ID NO: 175290 - DNA, 17 bp, Arabidopsis thaliana
ccgggaggttatggcgg

SEQ ID NO: 175291 - DNA, 17 bp, Arabidopsis thaliana
ccgggatgttgctggag

SEQ ID NO: 175292 - DNA, 17 bp, Arabidopsis thaliana
ccgggcacgacggggct

SEQ ID NO: 175293 - DNA, 17 bp, Arabidopsis thaliana
ccgggcagaggacatta

SEQ ID NO: 175294 - DNA, 17 bp, Arabidopsis thaliana
ccgggcagctaagttgg

SEQ ID NO: 175295 - DNA, 17 bp, Arabidopsis thaliana
ccgggcggaggacattg

SEQ ID NO: 175296 - DNA, 17 bp, Arabidopsis thaliana
ccgggctagaagcgacg

SEQ ID NO: 175297 - DNA, 17 bp, Arabidopsis thaliana
ccgggctctttgacggt

SEQ ID NO: 175298 - DNA, 17 bp, Arabidopsis thaliana
ccgggcttggcagaatc

SEQ ID NO: 175299 - DNA, 17 bp, Arabidopsis thaliana
ccgggcttttgatacgc

SEQ ID NO: 175300 - DNA, 17 bp, Arabidopsis thaliana
ccggggaagtatcaatt

SEQ ID NO: 175301 - DNA, 17 bp, Arabidopsis thaliana
ccggggataacaggctg

SEQ ID NO: 175302 - DNA, 17 bp, Arabidopsis thaliana
ccggggcaggtcgccac

SEQ ID NO: 175303 - DNA, 17 bp, Arabidopsis thaliana
ccgggggacggactggg

SEQ ID NO: 175304 - DNA, 17 bp, Arabidopsis thaliana
ccgggggcaggtcgcca

SEQ ID NO: 175305 - DNA, 17 bp, Arabidopsis thaliana
ccggggggagtatggtc

SEQ ID NO: 175306 - DNA, 17 bp, Arabidopsis thaliana
ccggtatgtgcaatgga

SEQ ID NO: 175307 - DNA, 17 bp, Arabidopsis thaliana
ccggtcagcatcatcag

SEQ ID NO: 175308 - DNA, 17 bp, Arabidopsis thaliana
ccggtccgcctttggtg

SEQ ID NO: 175309 - DNA, 17 bp, Arabidopsis thaliana
ccggtcgtactcataac

SEQ ID NO: 175310 - DNA, 17 bp, Arabidopsis thaliana
ccggtgaagtgttcgga

SEQ ID NO: 175311 - DNA, 17 bp, Arabidopsis thaliana
ccggtgcgccctcgacg

SEQ ID NO: 175312 - DNA, 17 bp, Arabidopsis thaliana
ccggtgctgacgaataa

SEQ ID NO: 175313 - DNA, 17 bp, Arabidopsis thaliana
ccggtgtcacagagaga

SEQ ID NO: 175314 - DNA, 17 bp, Arabidopsis thaliana
ccggtgtcacagagagc

SEQ ID NO: 175315 - DNA, 17 bp, Arabidopsis thaliana
ccggttcacccgggctc

SEQ ID NO: 175316 - DNA, 17 bp, Arabidopsis thaliana
ccggttgatgctggtgg

SEQ ID NO: 175317 - DNA, 17 bp, Arabidopsis thaliana
ccggttggtattcgctt

SEQ ID NO: 175318 - DNA, 17 bp, Arabidopsis thaliana
ccggttgtgggcgagga

SEQ ID NO: 175319 - DNA, 17 bp, Arabidopsis thaliana
ccggtttgactgctgtg

SEQ ID NO: 175320 - DNA, 17 bp, Arabidopsis thaliana
ccggttttagatttcgc

SEQ ID NO: 175321 - DNA, 17 bp, Arabidopsis thaliana
ccgtaattacaaaggca

SEQ ID NO: 175322 - DNA, 17 bp, Arabidopsis thaliana
ccgtacgcctaccgttt

SEQ ID NO: 175323 - DNA, 17 bp, Arabidopsis thaliana
ccgtacggttgctaaag

SEQ ID NO: 175324 - DNA, 17 bp, Arabidopsis thaliana
ccgtcagtctcggggtg

SEQ ID NO: 175325 - DNA, 17 bp, Arabidopsis thaliana
ccgtccaaggctaaata

SEQ ID NO: 175326 - DNA, 17 bp, Arabidopsis thaliana
ccgtccttagctcagtg

SEQ ID NO: 175327 - DNA, 17 bp, Arabidopsis thaliana
ccgtccttcgcgggcgg

SEQ ID NO: 175328 - DNA, 17 bp, Arabidopsis thaliana
ccgtcgaaaatgagtat

SEQ ID NO: 175329 - DNA, 17 bp, Arabidopsis thaliana
ccgtcgcggattacgga

SEQ ID NO: 175330 - DNA, 17 bp, Arabidopsis thaliana
ccgtcgcggattacggt

SEQ ID NO: 175331 - DNA, 17 bp, Arabidopsis thaliana
ccgtcgctgtcatcttc

SEQ ID NO: 175332 - DNA, 17 bp, Arabidopsis thaliana
ccgtcggggcaagagcc

SEQ ID NO: 175333 - DNA, 17 bp, Arabidopsis thaliana
ccgtcggtgcagatctt

SEQ ID NO: 175334 - DNA, 17 bp, Arabidopsis thaliana
ccgtcgtcgaaaagctg

SEQ ID NO: 175335 - DNA, 17 bp, Arabidopsis thaliana
ccgtcgtgagacaggta

SEQ ID NO: 175336 - DNA, 17 bp, Arabidopsis thaliana
ccgtcgtttcgtctccg

SEQ ID NO: 175337 - DNA, 17 bp, Arabidopsis thaliana
ccgtcgtttcgtctctg

SEQ ID NO: 175338 - DNA, 17 bp, Arabidopsis thaliana
ccgtctagcaatttgag

SEQ ID NO: 175339 - DNA, 17 bp, Arabidopsis thaliana
ccgtctgacttgggtat

SEQ ID NO: 175340 - DNA, 17 bp, Arabidopsis thaliana
ccgtctgcctgggtgtc

SEQ ID NO: 175341 - DNA, 17 bp, Arabidopsis thaliana
ccgtgaccatgaccatg

SEQ ID NO: 175342 - DNA, 17 bp, Arabidopsis thaliana
ccgtgatcgtggtctgc

SEQ ID NO: 175343 - DNA, 17 bp, Arabidopsis thaliana
ccgtgcgctggattata

SEQ ID NO: 175344 - DNA, 17 bp, Arabidopsis thaliana
ccgtgcgctggattatg

SEQ ID NO: 175345 - DNA, 17 bp, Arabidopsis thaliana
ccgtgcgctggtttatg

SEQ ID NO: 175346 - DNA, 17 bp, Arabidopsis thaliana
ccgtggacccgaaccag

SEQ ID NO: 175347 - DNA, 17 bp, Arabidopsis thaliana
ccgtgtcagccgctaac

SEQ ID NO: 175348 - DNA, 17 bp, Arabidopsis thaliana
ccgtgtgaatcagcaag

SEQ ID NO: 175349 - DNA, 17 bp, Arabidopsis thaliana
ccgtgtgctggattatg

SEQ ID NO: 175350 - DNA, 17 bp, Arabidopsis thaliana
ccgtgtgtgttaagcga

SEQ ID NO: 175351 - DNA, 17 bp, Arabidopsis thaliana
ccgtgtgttgatccatc

SEQ ID NO: 175352 - DNA, 17 bp, Arabidopsis thaliana
ccgttaacgaacgagac

SEQ ID NO: 175353 - DNA, 17 bp, Arabidopsis thaliana
ccgttccctaacggtgt

SEQ ID NO: 175354 - DNA, 17 bp, Arabidopsis thaliana
ccgttcccttggctgtg

SEQ ID NO: 175355 - DNA, 17 bp, Arabidopsis thaliana
ccgttccgcatccgacc

SEQ ID NO: 175356 - DNA, 17 bp, Arabidopsis thaliana
ccgttcggcggaagcgt

SEQ ID NO: 175357 - DNA, 17 bp, Arabidopsis thaliana
ccgttctcactgccttg

SEQ ID NO: 175358 - DNA, 17 bp, Arabidopsis thaliana
ccgttcttgaaccttgg

SEQ ID NO: 175359 - DNA, 17 bp, Arabidopsis thaliana
ccgttgcagtatttccg

SEQ ID NO: 175360 - DNA, 17 bp, Arabidopsis thaliana
ccgttggactacagacg

SEQ ID NO: 175361 - DNA, 17 bp, Arabidopsis thaliana
ccgttggggaagaatca

SEQ ID NO: 175362 - DNA, 17 bp, Arabidopsis thaliana
ccgttggggaagaatcg

SEQ ID NO: 175363 - DNA, 17 bp, Arabidopsis thaliana
ccgtttccagggtgggc

SEQ ID NO: 175364 - DNA, 17 bp, Arabidopsis thaliana
ccgttttctcagatgca

SEQ ID NO: 175365 - DNA, 17 bp, Arabidopsis thaliana
ccgttttggacaggtat

SEQ ID NO: 175366 - DNA, 17 bp, Arabidopsis thaliana
cctaaatccgagccaag

SEQ ID NO: 175367 - DNA, 17 bp, Arabidopsis thaliana
cctaagatgagctcaac

SEQ ID NO: 175368 - DNA, 17 bp, Arabidopsis thaliana
cctacaagcaccggggg

SEQ ID NO: 175369 - DNA, 17 bp, Arabidopsis thaliana
cctacatctgtgccact

SEQ ID NO: 175370 - DNA, 17 bp, Arabidopsis thaliana
cctacatggcgggtggg

SEQ ID NO: 175371 - DNA, 17 bp, Arabidopsis thaliana
cctaccatggtggtaac

SEQ ID NO: 175372 - DNA, 17 bp, Arabidopsis thaliana
cctaccgattgaatgat

SEQ ID NO: 175373 - DNA, 17 bp, Arabidopsis thaliana
cctaccgcaagagttgc

SEQ ID NO: 175374 - DNA, 17 bp, Arabidopsis thaliana
cctaccggctcaagtga

SEQ ID NO: 175375 - DNA, 17 bp, Arabidopsis thaliana
cctacgaccagcctcaa

SEQ ID NO: 175376 - DNA, 17 bp, Arabidopsis thaliana
cctacgaggctcgggcg

SEQ ID NO: 175377 - DNA, 17 bp, Arabidopsis thaliana
cctacgcggattacgga

SEQ ID NO: 175378 - DNA, 17 bp, Arabidopsis thaliana
cctacgctctggataca

SEQ ID NO: 175379 - DNA, 17 bp, Arabidopsis thaliana
cctacgggaggcagcag

SEQ ID NO: 175380 - DNA, 17 bp, Arabidopsis thaliana
cctacgggtcctgaact

SEQ ID NO: 175381 - DNA, 17 bp, Arabidopsis thaliana
cctactccgcccatacc

SEQ ID NO: 175382 - DNA, 17 bp, Arabidopsis thaliana
cctactgaattgtcaac

SEQ ID NO: 175383 - DNA, 17 bp, Arabidopsis thaliana
cctactgagggtcggca

SEQ ID NO: 175384 - DNA, 17 bp, Arabidopsis thaliana
cctactgatgcccgcgt

SEQ ID NO: 175385 - DNA, 17 bp, Arabidopsis thaliana
cctactgatttagccca

SEQ ID NO: 175386 - DNA, 17 bp, Arabidopsis thaliana
cctacttccagttagac

SEQ ID NO: 175387 - DNA, 17 bp, Arabidopsis thaliana
cctagaaaacgggaaga

SEQ ID NO: 175388 - DNA, 17 bp, Arabidopsis thaliana
cctaggccacagacaac

SEQ ID NO: 175389 - DNA, 17 bp, Arabidopsis thaliana
cctagtaagcgcgagtc

SEQ ID NO: 175390 - DNA, 17 bp, Arabidopsis thaliana
cctagtacgagaggaac

SEQ ID NO: 175391 - DNA, 17 bp, Arabidopsis thaliana
cctagtcgatgtttgac

SEQ ID NO: 175392 - DNA, 17 bp, Arabidopsis thaliana
cctagtcgcatcctgta

SEQ ID NO: 175393 - DNA, 17 bp, Arabidopsis thaliana
cctatgacgggagtgca

SEQ ID NO: 175394 - DNA, 17 bp, Arabidopsis thaliana
cctatgcctaagttgcc

SEQ ID NO: 175395 - DNA, 17 bp, Arabidopsis thaliana
cctattagtaggcccag

SEQ ID NO: 175396 - DNA, 17 bp, Arabidopsis thaliana
cctattgggtaccaagt

SEQ ID NO: 175397 - DNA, 17 bp, Arabidopsis thaliana
cctattgttggactacc

SEQ ID NO: 175398 - DNA, 17 bp, Arabidopsis thaliana
cctcaaaaaatctatct

SEQ ID NO: 175399 - DNA, 17 bp, Arabidopsis thaliana
cctcagcctgctaacta

SEQ ID NO: 175400 - DNA, 17 bp, Arabidopsis thaliana
cctcaggaggcttagca

SEQ ID NO: 175401 - DNA, 17 bp, Arabidopsis thaliana
cctcaggatagcagtgt

SEQ ID NO: 175402 - DNA, 17 bp, Arabidopsis thaliana
cctcaggatagctggag

SEQ ID NO: 175403 - DNA, 17 bp, Arabidopsis thaliana
cctcagttcgtgcctgg

SEQ ID NO: 175404 - DNA, 17 bp, Arabidopsis thaliana
cctcatattggcttcta

SEQ ID NO: 175405 - DNA, 17 bp, Arabidopsis thaliana
cctcatctagacgatca

SEQ ID NO: 175406 - DNA, 17 bp, Arabidopsis thaliana
cctccaactttagcagc

SEQ ID NO: 175407 - DNA, 17 bp, Arabidopsis thaliana
cctccaaggatgactcg

SEQ ID NO: 175408 - DNA, 17 bp, Arabidopsis thaliana
cctccactgcaagaacc

SEQ ID NO: 175409 - DNA, 17 bp, Arabidopsis thaliana
cctccagcaacagagca

SEQ ID NO: 175410 - DNA, 17 bp, Arabidopsis thaliana
cctcccacggtactgac

SEQ ID NO: 175411 - DNA, 17 bp, Arabidopsis thaliana
cctcccgatattaccga

SEQ ID NO: 175412 - DNA, 17 bp, Arabidopsis thaliana
cctccggattttcaagg

SEQ ID NO: 175413 - DNA, 17 bp, Arabidopsis thaliana
cctccgtggagcacatg

SEQ ID NO: 175414 - DNA, 17 bp, Arabidopsis thaliana
cctccgtggatggcgta

SEQ ID NO: 175415 - DNA, 17 bp, Arabidopsis thaliana
cctccgttatgacccga

SEQ ID NO: 175416 - DNA, 17 bp, Arabidopsis thaliana
cctcctactcatcgagg

SEQ ID NO: 175417 - DNA, 17 bp, Arabidopsis thaliana
cctcctgagcttgatca

SEQ ID NO: 175418 - DNA, 17 bp, Arabidopsis thaliana
cctcctgagcttgatcc

SEQ ID NO: 175419 - DNA, 17 bp, Arabidopsis thaliana
cctcggaccaggcttca

SEQ ID NO: 175420 - DNA, 17 bp, Arabidopsis thaliana
cctcgggatggtcatgc

SEQ ID NO: 175421 - DNA, 17 bp, Arabidopsis thaliana
cctcgtatctcagcagg

SEQ ID NO: 175422 - DNA, 17 bp, Arabidopsis thaliana
cctctaattcgttcgag

SEQ ID NO: 175423 - DNA, 17 bp, Arabidopsis thaliana
cctctacagatgcgact

SEQ ID NO: 175424 - DNA, 17 bp, Arabidopsis thaliana
cctctacaggatgcgac

SEQ ID NO: 175425 - DNA, 17 bp, Arabidopsis thaliana
cctctcacggtgccggc

SEQ ID NO: 175426 - DNA, 17 bp, Arabidopsis thaliana
cctctccgcgacgaacc

SEQ ID NO: 175427 - DNA, 17 bp, Arabidopsis thaliana
cctctccggaatcgaac

SEQ ID NO: 175428 - DNA, 17 bp, Arabidopsis thaliana
cctctcgcctccttagt

SEQ ID NO: 175429 - DNA, 17 bp, Arabidopsis thaliana
cctctctagggctttgt

SEQ ID NO: 175430 - DNA, 17 bp, Arabidopsis thaliana
cctctgctgctgctatg

SEQ ID NO: 175431 - DNA, 17 bp, Arabidopsis thaliana
cctctgctggattcgaa

SEQ ID NO: 175432 - DNA, 17 bp, Arabidopsis thaliana
cctctgtgctggcgacg

SEQ ID NO: 175433 - DNA, 17 bp, Arabidopsis thaliana
cctcttgacctctaatg

SEQ ID NO: 175434 - DNA, 17 bp, Arabidopsis thaliana
cctgacacggggaggta

SEQ ID NO: 175435 - DNA, 17 bp, Arabidopsis thaliana
cctgagaaacggctaca

SEQ ID NO: 175436 - DNA, 17 bp, Arabidopsis thaliana
cctgagaaacggctacc

SEQ ID NO: 175437 - DNA, 17 bp, Arabidopsis thaliana
cctgagccttcttgccg

SEQ ID NO: 175438 - DNA, 17 bp, Arabidopsis thaliana
cctgaggagggggatga

SEQ ID NO: 175439 - DNA, 17 bp, Arabidopsis thaliana
cctgccaactagctacg

SEQ ID NO: 175440 - DNA, 17 bp, Arabidopsis thaliana
cctgccctttgtacaca

SEQ ID NO: 175441 - DNA, 17 bp, Arabidopsis thaliana
cctgcgcaaggatgaca

SEQ ID NO: 175442 - DNA, 17 bp, Arabidopsis thaliana
cctgcggaaggatcatt

SEQ ID NO: 175443 - DNA, 17 bp, Arabidopsis thaliana
cctgcggatgctaacgc

SEQ ID NO: 175444 - DNA, 17 bp, Arabidopsis thaliana
cctgcggcttaatttga

SEQ ID NO: 175445 - DNA, 17 bp, Arabidopsis thaliana
cctgctaactagctacg

SEQ ID NO: 175446 - DNA, 17 bp, Arabidopsis thaliana
cctgctagctagctacg

SEQ ID NO: 175447 - DNA, 17 bp, Arabidopsis thaliana
cctgctaggcggactac

SEQ ID NO: 175448 - DNA, 17 bp, Arabidopsis thaliana
cctgctgccttccttgg

SEQ ID NO: 175449 - DNA, 17 bp, Arabidopsis thaliana
cctggaaacggctcagc

SEQ ID NO: 175450 - DNA, 17 bp, Arabidopsis thaliana
cctggactgatgttggc

SEQ ID NO: 175451 - DNA, 17 bp, Arabidopsis thaliana
cctgggtgtcacaaatc

SEQ ID NO: 175452 - DNA, 17 bp, Arabidopsis thaliana
cctggtaaaggacagag

SEQ ID NO: 175453 - DNA, 17 bp, Arabidopsis thaliana
cctggtcggatgcggaa

SEQ ID NO: 175454 - DNA, 17 bp, Arabidopsis thaliana
cctggttaaaactttca

SEQ ID NO: 175455 - DNA, 17 bp, Arabidopsis thaliana
cctggttgccgacgcct

SEQ ID NO: 175456 - DNA, 17 bp, Arabidopsis thaliana
cctggtttagtcactta

SEQ ID NO: 175457 - DNA, 17 bp, Arabidopsis thaliana
cctggtttagtcacttt

SEQ ID NO: 175458 - DNA, 17 bp, Arabidopsis thaliana
cctgtagattcgttcct

SEQ ID NO: 175459 - DNA, 17 bp, Arabidopsis thaliana
cctgtcagaccgccgtg

SEQ ID NO: 175460 - DNA, 17 bp, Arabidopsis thaliana
cctgtcggccaaggtgt

SEQ ID NO: 175461 - DNA, 17 bp, Arabidopsis thaliana
cctgtcggcgacggcgg

SEQ ID NO: 175462 - DNA, 17 bp, Arabidopsis thaliana
cctgtcgggacccgaaa

SEQ ID NO: 175463 - DNA, 17 bp, Arabidopsis thaliana
cctgtctactatccacc

SEQ ID NO: 175464 - DNA, 17 bp, Arabidopsis thaliana
cctgtctactatccagc

SEQ ID NO: 175465 - DNA, 17 bp, Arabidopsis thaliana
cctgtgcaaatattgtc

SEQ ID NO: 175466 - DNA, 17 bp, Arabidopsis thaliana
cctgttcaagtaaggtc

SEQ ID NO: 175467 - DNA, 17 bp, Arabidopsis thaliana
cctgtttgaaaattcca

SEQ ID NO: 175468 - DNA, 17 bp, Arabidopsis thaliana
ccttaagtcgcatcctg

SEQ ID NO: 175469 - DNA, 17 bp, Arabidopsis thaliana
ccttacaatctcaagat

SEQ ID NO: 175470 - DNA, 17 bp, Arabidopsis thaliana
ccttacgccaatgggac

SEQ ID NO: 175471 - DNA, 17 bp, Arabidopsis thaliana
ccttacgggaatcgaac

SEQ ID NO: 175472 - DNA, 17 bp, Arabidopsis thaliana
ccttagatgttctgggc

SEQ ID NO: 175473 - DNA, 17 bp, Arabidopsis thaliana
ccttagtcgcatcctgt

SEQ ID NO: 175474 - DNA, 17 bp, Arabidopsis thaliana
ccttatcatttagagga

SEQ ID NO: 175475 - DNA, 17 bp, Arabidopsis thaliana
ccttatgccctgggcga

SEQ ID NO: 175476 - DNA, 17 bp, Arabidopsis thaliana
ccttatggcttagggaa

SEQ ID NO: 175477 - DNA, 17 bp, Arabidopsis thaliana
ccttattgtcgccttta

SEQ ID NO: 175478 - DNA, 17 bp, Arabidopsis thaliana
ccttcaatcaaaagatc

SEQ ID NO: 175479 - DNA, 17 bp, Arabidopsis thaliana
ccttcaatccaaagatc

SEQ ID NO: 175480 - DNA, 17 bp, Arabidopsis thaliana
ccttcaatccaaagatt

SEQ ID NO: 175481 - DNA, 17 bp, Arabidopsis thaliana
ccttcaatccaaagtcc

SEQ ID NO: 175482 - DNA, 17 bp, Arabidopsis thaliana
ccttcaatcccgtcgct

SEQ ID NO: 175483 - DNA, 17 bp, Arabidopsis thaliana
ccttcacggccggcttc

SEQ ID NO: 175484 - DNA, 17 bp, Arabidopsis thaliana
ccttcataagttgcctt

SEQ ID NO: 175485 - DNA, 17 bp, Arabidopsis thaliana
ccttccaacccaaggtc

SEQ ID NO: 175486 - DNA, 17 bp, Arabidopsis thaliana
ccttccactaagcagat

SEQ ID NO: 175487 - DNA, 17 bp, Arabidopsis thaliana
ccttcccatcgacggtc

SEQ ID NO: 175488 - DNA, 17 bp, Arabidopsis thaliana
ccttccttggatgtggt

SEQ ID NO: 175489 - DNA, 17 bp, Arabidopsis thaliana
ccttcgatgtcggctct

SEQ ID NO: 175490 - DNA, 17 bp, Arabidopsis thaliana
ccttcgccgacgtctcc

SEQ ID NO: 175491 - DNA, 17 bp, Arabidopsis thaliana
ccttcgccgacgtctcg

SEQ ID NO: 175492 - DNA, 17 bp, Arabidopsis thaliana
ccttcgcgggacgggtt

SEQ ID NO: 175493 - DNA, 17 bp, Arabidopsis thaliana
ccttcgcgggcggaccc

SEQ ID NO: 175494 - DNA, 17 bp, Arabidopsis thaliana
ccttcgggacagcctag

SEQ ID NO: 175495 - DNA, 17 bp, Arabidopsis thaliana
ccttcggtcggcgatac

SEQ ID NO: 175496 - DNA, 17 bp, Arabidopsis thaliana
ccttctagagggaaaaa

SEQ ID NO: 175497 - DNA, 17 bp, Arabidopsis thaliana
ccttctagagggaaaac

SEQ ID NO: 175498 - DNA, 17 bp, Arabidopsis thaliana
ccttctcacaaatggtc

SEQ ID NO: 175499 - DNA, 17 bp, Arabidopsis thaliana
ccttctcatcgatggtc

SEQ ID NO: 175500 - DNA, 17 bp, Arabidopsis thaliana
ccttctcatcggtggtc

SEQ ID NO: 175501 - DNA, 17 bp, Arabidopsis thaliana
ccttctggccgagggca

SEQ ID NO: 175502 - DNA, 17 bp, Arabidopsis thaliana
ccttctttgcaataacg

SEQ ID NO: 175503 - DNA, 17 bp, Arabidopsis thaliana
ccttgaaaatccgcggg

SEQ ID NO: 175504 - DNA, 17 bp, Arabidopsis thaliana
ccttgaaaatccggagg

SEQ ID NO: 175505 - DNA, 17 bp, Arabidopsis thaliana
ccttgacgtacctccgc

SEQ ID NO: 175506 - DNA, 17 bp, Arabidopsis thaliana
ccttgatcacggttgag

SEQ ID NO: 175507 - DNA, 17 bp, Arabidopsis thaliana
ccttgcagagagaaatc

SEQ ID NO: 175508 - DNA, 17 bp, Arabidopsis thaliana
ccttgcatcaactgaat

SEQ ID NO: 175509 - DNA, 17 bp, Arabidopsis thaliana
ccttgctgccacgatcc

SEQ ID NO: 175510 - DNA, 17 bp, Arabidopsis thaliana
ccttggaagcggccgtg

SEQ ID NO: 175511 - DNA, 17 bp, Arabidopsis thaliana
ccttggagaaatatgca

SEQ ID NO: 175512 - DNA, 17 bp, Arabidopsis thaliana
ccttggagaaatatgcg

SEQ ID NO: 175513 - DNA, 17 bp, Arabidopsis thaliana
ccttggagacctgatgc

SEQ ID NO: 175514 - DNA, 17 bp, Arabidopsis thaliana
ccttggatctgccgtcc

SEQ ID NO: 175515 - DNA, 17 bp, Arabidopsis thaliana
ccttgggatgggtcggc

SEQ ID NO: 175516 - DNA, 17 bp, Arabidopsis thaliana
ccttgggtgcttgctgg

SEQ ID NO: 175517 - DNA, 17 bp, Arabidopsis thaliana
ccttgtaagaccccatc

SEQ ID NO: 175518 - DNA, 17 bp, Arabidopsis thaliana
ccttgtaaggccttttc

SEQ ID NO: 175519 - DNA, 17 bp, Arabidopsis thaliana
ccttgtctacaattttg

SEQ ID NO: 175520 - DNA, 17 bp, Arabidopsis thaliana
ccttgtgacgaaaacta

SEQ ID NO: 175521 - DNA, 17 bp, Arabidopsis thaliana
cctttccctttctacat

SEQ ID NO: 175522 - DNA, 17 bp, Arabidopsis thaliana
cctttccttctggctaa

SEQ ID NO: 175523 - DNA, 17 bp, Arabidopsis thaliana
cctttctacattgtcaa

SEQ ID NO: 175524 - DNA, 17 bp, Arabidopsis thaliana
cctttgccgctaagata

SEQ ID NO: 175525 - DNA, 17 bp, Arabidopsis thaliana
cctttgccgctaagatt

SEQ ID NO: 175526 - DNA, 17 bp, Arabidopsis thaliana
cctttgctgatgcagga

SEQ ID NO: 175527 - DNA, 17 bp, Arabidopsis thaliana
cctttgctgatgcggga

SEQ ID NO: 175528 - DNA, 17 bp, Arabidopsis thaliana
cctttgctgatgcgggg

SEQ ID NO: 175529 - DNA, 17 bp, Arabidopsis thaliana
cctttggcgtgcattgg

SEQ ID NO: 175530 - DNA, 17 bp, Arabidopsis thaliana
cctttggtgtgcattgg

SEQ ID NO: 175531 - DNA, 17 bp, Arabidopsis thaliana
cctttgtacacaccgcc

SEQ ID NO: 175532 - DNA, 17 bp, Arabidopsis thaliana
cctttgtacacaccgtc

SEQ ID NO: 175533 - DNA, 17 bp, Arabidopsis thaliana
cctttgtcgctaagata

SEQ ID NO: 175534 - DNA, 17 bp, Arabidopsis thaliana
cctttgtcgctaagatt

SEQ ID NO: 175535 - DNA, 17 bp, Arabidopsis thaliana
cctttgtcgctaatatt

SEQ ID NO: 175536 - DNA, 17 bp, Arabidopsis thaliana
cctttgttatccatttc

SEQ ID NO: 175537 - DNA, 17 bp, Arabidopsis thaliana
ccttttcagaccaaact

SEQ ID NO: 175538 - DNA, 17 bp, Arabidopsis thaliana
ccttttctttctcacga

SEQ ID NO: 175539 - DNA, 17 bp, Arabidopsis thaliana
cctttttaagggtcgaa

SEQ ID NO: 175540 - DNA, 17 bp, Arabidopsis thaliana
cctttttctggtctttt

SEQ ID NO: 175541 - DNA, 17 bp, Arabidopsis thaliana
cgaaaatggatggcgct

SEQ ID NO: 175542 - DNA, 17 bp, Arabidopsis thaliana
cgaaacaaaatttctaa

SEQ ID NO: 175543 - DNA, 17 bp, Arabidopsis thaliana
cgaaaccacggatccgg

SEQ ID NO: 175544 - DNA, 17 bp, Arabidopsis thaliana
cgaaacctggctctgat

SEQ ID NO: 175545 - DNA, 17 bp, Arabidopsis thaliana
cgaaactgacacatggc

SEQ ID NO: 175546 - DNA, 17 bp, Arabidopsis thaliana
cgaaagaaggactataa

SEQ ID NO: 175547 - DNA, 17 bp, Arabidopsis thaliana
cgaaagactaatcgaac

SEQ ID NO: 175548 - DNA, 17 bp, Arabidopsis thaliana
cgaaagagcccggtatt

SEQ ID NO: 175549 - DNA, 17 bp, Arabidopsis thaliana
cgaaagatggtgaacta

SEQ ID NO: 175550 - DNA, 17 bp, Arabidopsis thaliana
cgaaagcatttgccaag

SEQ ID NO: 175551 - DNA, 17 bp, Arabidopsis thaliana
cgaaagggtcctgtaag

SEQ ID NO: 175552 - DNA, 17 bp, Arabidopsis thaliana
cgaaatgcgatacttgg

SEQ ID NO: 175553 - DNA, 17 bp, Arabidopsis thaliana
cgaaattggtaccccga

SEQ ID NO: 175554 - DNA, 17 bp, Arabidopsis thaliana
cgaaccacccacccacc

SEQ ID NO: 175555 - DNA, 17 bp, Arabidopsis thaliana
cgaaccacccacgtcgc

SEQ ID NO: 175556 - DNA, 17 bp, Arabidopsis thaliana
cgaaccactcacgtcgc

SEQ ID NO: 175557 - DNA, 17 bp, Arabidopsis thaliana
cgaaccagtgtcccacc

SEQ ID NO: 175558 - DNA, 17 bp, Arabidopsis thaliana
cgaaccatctagtagct

SEQ ID NO: 175559 - DNA, 17 bp, Arabidopsis thaliana
cgaacccgggcgaagcc

SEQ ID NO: 175560 - DNA, 17 bp, Arabidopsis thaliana
cgaacccgggctcagac

SEQ ID NO: 175561 - DNA, 17 bp, Arabidopsis thaliana
cgaacccggttgagccc

SEQ ID NO: 175562 - DNA, 17 bp, Arabidopsis thaliana
cgaacccggttgagtga

SEQ ID NO: 175563 - DNA, 17 bp, Arabidopsis thaliana
cgaaccctccgtgcgcc

SEQ ID NO: 175564 - DNA, 17 bp, Arabidopsis thaliana
cgaaccgacaccgtacc

SEQ ID NO: 175565 - DNA, 17 bp, Arabidopsis thaliana
cgaaccttctcctggaa

SEQ ID NO: 175566 - DNA, 17 bp, Arabidopsis thaliana
cgaacgacgcttccgcc

SEQ ID NO: 175567 - DNA, 17 bp, Arabidopsis thaliana
cgaacgacgcttccgcg

SEQ ID NO: 175568 - DNA, 17 bp, Arabidopsis thaliana
cgaacgacgcttccggt

SEQ ID NO: 175569 - DNA, 17 bp, Arabidopsis thaliana
cgaacgagacctcagcc

SEQ ID NO: 175570 - DNA, 17 bp, Arabidopsis thaliana
cgaactaccgatggttg

SEQ ID NO: 175571 - DNA, 17 bp, Arabidopsis thaliana
cgaactagtactcaggt

SEQ ID NO: 175572 - DNA, 17 bp, Arabidopsis thaliana
cgaactcagatacaggt

SEQ ID NO: 175573 - DNA, 17 bp, Arabidopsis thaliana
cgaactgaaacatctaa

SEQ ID NO: 175574 - DNA, 17 bp, Arabidopsis thaliana
cgaagaacgatccggct

SEQ ID NO: 175575 - DNA, 17 bp, Arabidopsis thaliana
cgaagacgatcagatac

SEQ ID NO: 175576 - DNA, 17 bp, Arabidopsis thaliana
cgaagacgtcaagttcg

SEQ ID NO: 175577 - DNA, 17 bp, Arabidopsis thaliana
cgaagatcttgggctca

SEQ ID NO: 175578 - DNA, 17 bp, Arabidopsis thaliana
cgaagcgagccttggga

SEQ ID NO: 175579 - DNA, 17 bp, Arabidopsis thaliana
cgaagctaccgtgcgct

SEQ ID NO: 175580 - DNA, 17 bp, Arabidopsis thaliana
cgaagctgccaacatga

SEQ ID NO: 175581 - DNA, 17 bp, Arabidopsis thaliana
cgaagctgccagcatga

SEQ ID NO: 175582 - DNA, 17 bp, Arabidopsis thaliana
cgaagcttctcggtagc

SEQ ID NO: 175583 - DNA, 17 bp, Arabidopsis thaliana
cgaaggcagctctctgg

SEQ ID NO: 175584 - DNA, 17 bp, Arabidopsis thaliana
cgaaggctcgggtctca

SEQ ID NO: 175585 - DNA, 17 bp, Arabidopsis thaliana
cgaaggcttggctcagg

SEQ ID NO: 175586 - DNA, 17 bp, Arabidopsis thaliana
cgaaggcttggctcatg

SEQ ID NO: 175587 - DNA, 17 bp, Arabidopsis thaliana
cgaaggtaagattatac

SEQ ID NO: 175588 - DNA, 17 bp, Arabidopsis thaliana
cgaaggtcgcaggttcg

SEQ ID NO: 175589 - DNA, 17 bp, Arabidopsis thaliana
cgaaggttactattggc

SEQ ID NO: 175590 - DNA, 17 bp, Arabidopsis thaliana
cgaagtattccgtcgtc

SEQ ID NO: 175591 - DNA, 17 bp, Arabidopsis thaliana
cgaagtgattcagtccc

SEQ ID NO: 175592 - DNA, 17 bp, Arabidopsis thaliana
cgaagttaccgtgcgct

SEQ ID NO: 175593 - DNA, 17 bp, Arabidopsis thaliana
cgaagttccaagtcctc

SEQ ID NO: 175594 - DNA, 17 bp, Arabidopsis thaliana
cgaatacgaaccgtgaa

SEQ ID NO: 175595 - DNA, 17 bp, Arabidopsis thaliana
cgaatagtcgcgaggcc

SEQ ID NO: 175596 - DNA, 17 bp, Arabidopsis thaliana
cgaatcccactctgatc

SEQ ID NO: 175597 - DNA, 17 bp, Arabidopsis thaliana
cgaatcccactgggtgt

SEQ ID NO: 175598 - DNA, 17 bp, Arabidopsis thaliana
cgaatcctacttgggga

SEQ ID NO: 175599 - DNA, 17 bp, Arabidopsis thaliana
cgaatcctgccgttcac

SEQ ID NO: 175600 - DNA, 17 bp, Arabidopsis thaliana
cgaatcctggaaaagtt

SEQ ID NO: 175601 - DNA, 17 bp, Arabidopsis thaliana
cgaatcgatcggcggac

SEQ ID NO: 175602 - DNA, 17 bp, Arabidopsis thaliana
cgaatcgggtacgtaca

SEQ ID NO: 175603 - DNA, 17 bp, Arabidopsis thaliana
cgaatctaaggtactcg

SEQ ID NO: 175604 - DNA, 17 bp, Arabidopsis thaliana
cgaatctccgtcccagc

SEQ ID NO: 175605 - DNA, 17 bp, Arabidopsis thaliana
cgaatctctcaggcgac

SEQ ID NO: 175606 - DNA, 17 bp, Arabidopsis thaliana
cgaatcttagcgacaaa

SEQ ID NO: 175607 - DNA, 17 bp, Arabidopsis thaliana
cgaatcttccgacaaaa

SEQ ID NO: 175608 - DNA, 17 bp, Arabidopsis thaliana
cgaatcttgatgatgct

SEQ ID NO: 175609 - DNA, 17 bp, Arabidopsis thaliana
cgaatgctaacgcaatg

SEQ ID NO: 175610 - DNA, 17 bp, Arabidopsis thaliana
cgaatggtgtaacgact

SEQ ID NO: 175611 - DNA, 17 bp, Arabidopsis thaliana
cgaattaggtaaatgtt

SEQ ID NO: 175612 - DNA, 17 bp, Arabidopsis thaliana
cgaattgatgtgtaact

SEQ ID NO: 175613 - DNA, 17 bp, Arabidopsis thaliana
cgacaaaatgcacgtcc

SEQ ID NO: 175614 - DNA, 17 bp, Arabidopsis thaliana
cgacaatcctgcgggta

SEQ ID NO: 175615 - DNA, 17 bp, Arabidopsis thaliana
cgacaccggaacttagg

SEQ ID NO: 175616 - DNA, 17 bp, Arabidopsis thaliana
cgacacctgcaaagctt

SEQ ID NO: 175617 - DNA, 17 bp, Arabidopsis thaliana
cgacacggcgaggtagt

SEQ ID NO: 175618 - DNA, 17 bp, Arabidopsis thaliana
cgacacgtgcctttggg

SEQ ID NO: 175619 - DNA, 17 bp, Arabidopsis thaliana
cgacacgtggtacccgc

SEQ ID NO: 175620 - DNA, 17 bp, Arabidopsis thaliana
cgacactaatgtagcta

SEQ ID NO: 175621 - DNA, 17 bp, Arabidopsis thaliana
cgacactaatgtagctg

SEQ ID NO: 175622 - DNA, 17 bp, Arabidopsis thaliana
cgacagcagttcctgta

SEQ ID NO: 175623 - DNA, 17 bp, Arabidopsis thaliana
cgacaggcatgctcaca

SEQ ID NO: 175624 - DNA, 17 bp, Arabidopsis thaliana
cgacaggcccgggtaat

SEQ ID NO: 175625 - DNA, 17 bp, Arabidopsis thaliana
cgacatcgaagtggggg

SEQ ID NO: 175626 - DNA, 17 bp, Arabidopsis thaliana
cgacatgcccgggtaat

SEQ ID NO: 175627 - DNA, 17 bp, Arabidopsis thaliana
cgaccacgagatcctcc

SEQ ID NO: 175628 - DNA, 17 bp, Arabidopsis thaliana
cgaccaggacgcatcgc

SEQ ID NO: 175629 - DNA, 17 bp, Arabidopsis thaliana
cgaccagggatcagcgg

SEQ ID NO: 175630 - DNA, 17 bp, Arabidopsis thaliana
cgacccagcgcctgtcc

SEQ ID NO: 175631 - DNA, 17 bp, Arabidopsis thaliana
cgacccggcgaacatct

SEQ ID NO: 175632 - DNA, 17 bp, Arabidopsis thaliana
cgaccctcagtaggagc

SEQ ID NO: 175633 - DNA, 17 bp, Arabidopsis thaliana
cgaccgaagggacaagc

SEQ ID NO: 175634 - DNA, 17 bp, Arabidopsis thaliana
cgacctatacccggccg

SEQ ID NO: 175635 - DNA, 17 bp, Arabidopsis thaliana
cgacctatgcccaggct

SEQ ID NO: 175636 - DNA, 17 bp, Arabidopsis thaliana
cgacctccgccgcttcg

SEQ ID NO: 175637 - DNA, 17 bp, Arabidopsis thaliana
cgacctcgtggcagcag

SEQ ID NO: 175638 - DNA, 17 bp, Arabidopsis thaliana
cgacctgatgatcctgc

SEQ ID NO: 175639 - DNA, 17 bp, Arabidopsis thaliana
cgacctgccggaaacga

SEQ ID NO: 175640 - DNA, 17 bp, Arabidopsis thaliana
cgacctgccggaaacgg

SEQ ID NO: 175641 - DNA, 17 bp, Arabidopsis thaliana
cgacctgccggaagaac

SEQ ID NO: 175642 - DNA, 17 bp, Arabidopsis thaliana
cgacctgccggaatcga

SEQ ID NO: 175643 - DNA, 17 bp, Arabidopsis thaliana
cgaccttagctcagttg

SEQ ID NO: 175644 - DNA, 17 bp, Arabidopsis thaliana
cgaccttatctcagttg

SEQ ID NO: 175645 - DNA, 17 bp, Arabidopsis thaliana
cgaccttcaatcccgtc

SEQ ID NO: 175646 - DNA, 17 bp, Arabidopsis thaliana
cgaccttcagcaggggc

SEQ ID NO: 175647 - DNA, 17 bp, Arabidopsis thaliana
cgaccttgatcttctga

SEQ ID NO: 175648 - DNA, 17 bp, Arabidopsis thaliana
cgacgaaagtccgttcg

SEQ ID NO: 175649 - DNA, 17 bp, Arabidopsis thaliana
cgacgaagggctttggt

SEQ ID NO: 175650 - DNA, 17 bp, Arabidopsis thaliana
cgacgagagtcctgcca

SEQ ID NO: 175651 - DNA, 17 bp, Arabidopsis thaliana
cgacgagatgatcaaaa

SEQ ID NO: 175652 - DNA, 17 bp, Arabidopsis thaliana
cgacgatacctcccgca

SEQ ID NO: 175653 - DNA, 17 bp, Arabidopsis thaliana
cgacgatgacacatatc

SEQ ID NO: 175654 - DNA, 17 bp, Arabidopsis thaliana
cgacgcagattacggtg

SEQ ID NO: 175655 - DNA, 17 bp, Arabidopsis thaliana
cgacgcagcaggacctc

SEQ ID NO: 175656 - DNA, 17 bp, Arabidopsis thaliana
cgacgcatcattcaaat

SEQ ID NO: 175657 - DNA, 17 bp, Arabidopsis thaliana
cgacgcatgcgcccgcc

SEQ ID NO: 175658 - DNA, 17 bp, Arabidopsis thaliana
cgacgcggattacggta

SEQ ID NO: 175659 - DNA, 17 bp, Arabidopsis thaliana
cgacgcggattacggtg

SEQ ID NO: 175660 - DNA, 17 bp, Arabidopsis thaliana
cgacgcggattacgtac

SEQ ID NO: 175661 - DNA, 17 bp, Arabidopsis thaliana
cgacgcggattatggtg

SEQ ID NO: 175662 - DNA, 17 bp, Arabidopsis thaliana
cgacgcgggcatcagta

SEQ ID NO: 175663 - DNA, 17 bp, Arabidopsis thaliana
cgacggatcgcatggcc

SEQ ID NO: 175664 - DNA, 17 bp, Arabidopsis thaliana
cgacggcattacggtaa

SEQ ID NO: 175665 - DNA, 17 bp, Arabidopsis thaliana
cgacgggattgaaggtc

SEQ ID NO: 175666 - DNA, 17 bp, Arabidopsis thaliana
cgacgggcggtgtgtac

SEQ ID NO: 175667 - DNA, 17 bp, Arabidopsis thaliana
cgacggggtattgtaag

SEQ ID NO: 175668 - DNA, 17 bp, Arabidopsis thaliana
cgacggtggttgacggc

SEQ ID NO: 175669 - DNA, 17 bp, Arabidopsis thaliana
cgacgtcgcgagaagtc

SEQ ID NO: 175670 - DNA, 17 bp, Arabidopsis thaliana
cgacgtcgcgggcggcg

SEQ ID NO: 175671 - DNA, 17 bp, Arabidopsis thaliana
cgacgtggattacggtg

SEQ ID NO: 175672 - DNA, 17 bp, Arabidopsis thaliana
cgacgttgcttttgatc

SEQ ID NO: 175673 - DNA, 17 bp, Arabidopsis thaliana
cgacgtttcagttcttg

SEQ ID NO: 175674 - DNA, 17 bp, Arabidopsis thaliana
cgactaagaccgatgga

SEQ ID NO: 175675 - DNA, 17 bp, Arabidopsis thaliana
cgactaagaccggatta

SEQ ID NO: 175676 - DNA, 17 bp, Arabidopsis thaliana
cgactaagaccgtataa

SEQ ID NO: 175677 - DNA, 17 bp, Arabidopsis thaliana
cgactaagaccgtattg

SEQ ID NO: 175678 - DNA, 17 bp, Arabidopsis thaliana
cgactaagacctcatct

SEQ ID NO: 175679 - DNA, 17 bp, Arabidopsis thaliana
cgactaaggatccatct

SEQ ID NO: 175680 - DNA, 17 bp, Arabidopsis thaliana
cgactagggatcgggtg

SEQ ID NO: 175681 - DNA, 17 bp, Arabidopsis thaliana
cgacttaaatacgcgac

SEQ ID NO: 175682 - DNA, 17 bp, Arabidopsis thaliana
cgacttacggattcatt

SEQ ID NO: 175683 - DNA, 17 bp, Arabidopsis thaliana
cgacttacggattccat

SEQ ID NO: 175684 - DNA, 17 bp, Arabidopsis thaliana
cgacttatggaagggac

SEQ ID NO: 175685 - DNA, 17 bp, Arabidopsis thaliana
cgacttcccctgggggt

SEQ ID NO: 175686 - DNA, 17 bp, Arabidopsis thaliana
cgacttccgccgctaag

SEQ ID NO: 175687 - DNA, 17 bp, Arabidopsis thaliana
cgacttctccagcagcc

SEQ ID NO: 175688 - DNA, 17 bp, Arabidopsis thaliana
cgagaaacgaactcggg

SEQ ID NO: 175689 - DNA, 17 bp, Arabidopsis thaliana
cgagaagattattgtct

SEQ ID NO: 175690 - DNA, 17 bp, Arabidopsis thaliana
cgagaagcatcactcca

SEQ ID NO: 175691 - DNA, 17 bp, Arabidopsis thaliana
cgagaagtccactaaac

SEQ ID NO: 175692 - DNA, 17 bp, Arabidopsis thaliana
cgagaccaccggaacct

SEQ ID NO: 175693 - DNA, 17 bp, Arabidopsis thaliana
cgagaccccgttagtaa

SEQ ID NO: 175694 - DNA, 17 bp, Arabidopsis thaliana
cgagaccccgttagtag

SEQ ID NO: 175695 - DNA, 17 bp, Arabidopsis thaliana
cgagaccctactacacg

SEQ ID NO: 175696 - DNA, 17 bp, Arabidopsis thaliana
cgagacgcaaacagggt

SEQ ID NO: 175697 - DNA, 17 bp, Arabidopsis thaliana
cgagacgggcaagctga

SEQ ID NO: 175698 - DNA, 17 bp, Arabidopsis thaliana
cgagacgggcaagttaa

SEQ ID NO: 175699 - DNA, 17 bp, Arabidopsis thaliana
cgagacgggcaagttga

SEQ ID NO: 175700 - DNA, 17 bp, Arabidopsis thaliana
cgagagaacttattggc

SEQ ID NO: 175701 - DNA, 17 bp, Arabidopsis thaliana
cgagagaaggtcgacgc

SEQ ID NO: 175702 - DNA, 17 bp, Arabidopsis thaliana
cgagagacccgggttca

SEQ ID NO: 175703 - DNA, 17 bp, Arabidopsis thaliana
cgagagacccgggttcg

SEQ ID NO: 175704 - DNA, 17 bp, Arabidopsis thaliana
cgagagctccaagtggg

SEQ ID NO: 175705 - DNA, 17 bp, Arabidopsis thaliana
cgagaggaaataggaga

SEQ ID NO: 175706 - DNA, 17 bp, Arabidopsis thaliana
cgagaggaaccgttgaa

SEQ ID NO: 175707 - DNA, 17 bp, Arabidopsis thaliana
cgagaggaaccgttgat

SEQ ID NO: 175708 - DNA, 17 bp, Arabidopsis thaliana
cgagaggcatcactcca

SEQ ID NO: 175709 - DNA, 17 bp, Arabidopsis thaliana
cgagaggcattactcca

SEQ ID NO: 175710 - DNA, 17 bp, Arabidopsis thaliana
cgagagtagtactagga

SEQ ID NO: 175711 - DNA, 17 bp, Arabidopsis thaliana
cgagagtattactagga

SEQ ID NO: 175712 - DNA, 17 bp, Arabidopsis thaliana
cgagagtggtgatcttt

SEQ ID NO: 175713 - DNA, 17 bp, Arabidopsis thaliana
cgagataagcagtgtag

SEQ ID NO: 175714 - DNA, 17 bp, Arabidopsis thaliana
cgagatacccctcggga

SEQ ID NO: 175715 - DNA, 17 bp, Arabidopsis thaliana
cgagatccctcccaaaa

SEQ ID NO: 175716 - DNA, 17 bp, Arabidopsis thaliana
cgagatcccttccaaaa

SEQ ID NO: 175717 - DNA, 17 bp, Arabidopsis thaliana
cgagatgatcaaaaggt

SEQ ID NO: 175718 - DNA, 17 bp, Arabidopsis thaliana
cgagcacgcacgagcac

SEQ ID NO: 175719 - DNA, 17 bp, Arabidopsis thaliana
cgagcagaatcttagct

SEQ ID NO: 175720 - DNA, 17 bp, Arabidopsis thaliana
cgagcagacaagacaat

SEQ ID NO: 175721 - DNA, 17 bp, Arabidopsis thaliana
cgagccaaagccgtaca

SEQ ID NO: 175722 - DNA, 17 bp, Arabidopsis thaliana
cgagccaaatgggagca

SEQ ID NO: 175723 - DNA, 17 bp, Arabidopsis thaliana
cgagccaaggacgcctg

SEQ ID NO: 175724 - DNA, 17 bp, Arabidopsis thaliana
cgagccagcaggccatg

SEQ ID NO: 175725 - DNA, 17 bp, Arabidopsis thaliana
cgagccagtgatccacc

SEQ ID NO: 175726 - DNA, 17 bp, Arabidopsis thaliana
cgagccagtgttccacc

SEQ ID NO: 175727 - DNA, 17 bp, Arabidopsis thaliana
cgagccagttttgaaaa

SEQ ID NO: 175728 - DNA, 17 bp, Arabidopsis thaliana
cgagccccgccgggacc

SEQ ID NO: 175729 - DNA, 17 bp, Arabidopsis thaliana
cgagccctactaagcca

SEQ ID NO: 175730 - DNA, 17 bp, Arabidopsis thaliana
cgagcctcgtagtcgcc

SEQ ID NO: 175731 - DNA, 17 bp, Arabidopsis thaliana
cgagcctctctcacccc

SEQ ID NO: 175732 - DNA, 17 bp, Arabidopsis thaliana
cgagcgagccaacccat

SEQ ID NO: 175733 - DNA, 17 bp, Arabidopsis thaliana
cgagcggcgggtagaat

SEQ ID NO: 175734 - DNA, 17 bp, Arabidopsis thaliana
cgagcggcggttagatt

SEQ ID NO: 175735 - DNA, 17 bp, Arabidopsis thaliana
cgagctgatgactcgcg

SEQ ID NO: 175736 - DNA, 17 bp, Arabidopsis thaliana
cgagctgcttgatgact

SEQ ID NO: 175737 - DNA, 17 bp, Arabidopsis thaliana
cgagcttcagaggttgc

SEQ ID NO: 175738 - DNA, 17 bp, Arabidopsis thaliana
cgagcttcttgacaacg

SEQ ID NO: 175739 - DNA, 17 bp, Arabidopsis thaliana
cgaggatccattggagg

SEQ ID NO: 175740 - DNA, 17 bp, Arabidopsis thaliana
cgaggcgctgtctacga

SEQ ID NO: 175741 - DNA, 17 bp, Arabidopsis thaliana
cgagggcacgtctgcct

SEQ ID NO: 175742 - DNA, 17 bp, Arabidopsis thaliana
cgagggtgagctaactc

SEQ ID NO: 175743 - DNA, 17 bp, Arabidopsis thaliana
cgaggtgtagcgaagaa

SEQ ID NO: 175744 - DNA, 17 bp, Arabidopsis thaliana
cgaggtgtagcgcagtc

SEQ ID NO: 175745 - DNA, 17 bp, Arabidopsis thaliana
cgagtagtttgggaatg

SEQ ID NO: 175746 - DNA, 17 bp, Arabidopsis thaliana
cgagtcaacgggtgagt

SEQ ID NO: 175747 - DNA, 17 bp, Arabidopsis thaliana
cgagtcaccaaggcttg

SEQ ID NO: 175748 - DNA, 17 bp, Arabidopsis thaliana
cgagtcatcagctcgcg

SEQ ID NO: 175749 - DNA, 17 bp, Arabidopsis thaliana
cgagtccattgttgcgg

SEQ ID NO: 175750 - DNA, 17 bp, Arabidopsis thaliana
cgagtcccggcgacgga

SEQ ID NO: 175751 - DNA, 17 bp, Arabidopsis thaliana
cgagtccgtatagccct

SEQ ID NO: 175752 - DNA, 17 bp, Arabidopsis thaliana
cgagtcgacctccaggg

SEQ ID NO: 175753 - DNA, 17 bp, Arabidopsis thaliana
cgagtcgcccatgcgtt

SEQ ID NO: 175754 - DNA, 17 bp, Arabidopsis thaliana
cgagtcgcttccagacc

SEQ ID NO: 175755 - DNA, 17 bp, Arabidopsis thaliana
cgagtcgggttgtttgg

SEQ ID NO: 175756 - DNA, 17 bp, Arabidopsis thaliana
cgagtctagccgcgaga

SEQ ID NO: 175757 - DNA, 17 bp, Arabidopsis thaliana
cgagtctgtttatagtc

SEQ ID NO: 175758 - DNA, 17 bp, Arabidopsis thaliana
cgagtgatcgagcacac

SEQ ID NO: 175759 - DNA, 17 bp, Arabidopsis thaliana
cgagtgccgctcacgcc

SEQ ID NO: 175760 - DNA, 17 bp, Arabidopsis thaliana
cgagtggcctaggctag

SEQ ID NO: 175761 - DNA, 17 bp, Arabidopsis thaliana
cgagttctatcgggtaa

SEQ ID NO: 175762 - DNA, 17 bp, Arabidopsis thaliana
cgataaacacatcgtgg

SEQ ID NO: 175763 - DNA, 17 bp, Arabidopsis thaliana
cgataaacctctgcatc

SEQ ID NO: 175764 - DNA, 17 bp, Arabidopsis thaliana
cgataacaggacgcttg

SEQ ID NO: 175765 - DNA, 17 bp, Arabidopsis thaliana
cgatacagagaagatta

SEQ ID NO: 175766 - DNA, 17 bp, Arabidopsis thaliana
cgataccccgcatctcc

SEQ ID NO: 175767 - DNA, 17 bp, Arabidopsis thaliana
cgatactgacgtgcaaa

SEQ ID NO: 175768 - DNA, 17 bp, Arabidopsis thaliana
cgatacttggtgtgaat

SEQ ID NO: 175769 - DNA, 17 bp, Arabidopsis thaliana
cgataggccacgctttc

SEQ ID NO: 175770 - DNA, 17 bp, Arabidopsis thaliana
cgatatgttgaacttag

SEQ ID NO: 175771 - DNA, 17 bp, Arabidopsis thaliana
cgatcaacaagagttac

SEQ ID NO: 175772 - DNA, 17 bp, Arabidopsis thaliana
cgatcaccactcataca

SEQ ID NO: 175773 - DNA, 17 bp, Arabidopsis thaliana
cgatcaccactcatacg

SEQ ID NO: 175774 - DNA, 17 bp, Arabidopsis thaliana
cgatcagataccgtcct

SEQ ID NO: 175775 - DNA, 17 bp, Arabidopsis thaliana
cgatccaattcgggttc

SEQ ID NO: 175776 - DNA, 17 bp, Arabidopsis thaliana
cgatccactgagattca

SEQ ID NO: 175777 - DNA, 17 bp, Arabidopsis thaliana
cgatccattgagattca

SEQ ID NO: 175778 - DNA, 17 bp, Arabidopsis thaliana
cgatccgctgagattca

SEQ ID NO: 175779 - DNA, 17 bp, Arabidopsis thaliana
cgatccgggcggaggac

SEQ ID NO: 175780 - DNA, 17 bp, Arabidopsis thaliana
cgatcctattgtgttgg

SEQ ID NO: 175781 - DNA, 17 bp, Arabidopsis thaliana
cgatcctctacagatgc

SEQ ID NO: 175782 - DNA, 17 bp, Arabidopsis thaliana
cgatcctgcgtgtgggc

SEQ ID NO: 175783 - DNA, 17 bp, Arabidopsis thaliana
cgatcctgtagatggat

SEQ ID NO: 175784 - DNA, 17 bp, Arabidopsis thaliana
cgatcgataaacctctg

SEQ ID NO: 175785 - DNA, 17 bp, Arabidopsis thaliana
cgatcgattcggggcgt

SEQ ID NO: 175786 - DNA, 17 bp, Arabidopsis thaliana
cgatctagacgaattgg

SEQ ID NO: 175787 - DNA, 17 bp, Arabidopsis thaliana
cgatctcattgggccgg

SEQ ID NO: 175788 - DNA, 17 bp, Arabidopsis thaliana
cgatctctgtcgggcca

SEQ ID NO: 175789 - DNA, 17 bp, Arabidopsis thaliana
cgatgaagctggagaca

SEQ ID NO: 175790 - DNA, 17 bp, Arabidopsis thaliana
cgatgatgagttccggg

SEQ ID NO: 175791 - DNA, 17 bp, Arabidopsis thaliana
cgatgatggatgagtcc

SEQ ID NO: 175792 - DNA, 17 bp, Arabidopsis thaliana
cgatgccgaccagggat

SEQ ID NO: 175793 - DNA, 17 bp, Arabidopsis thaliana
cgatgcgcgagcatgga

SEQ ID NO: 175794 - DNA, 17 bp, Arabidopsis thaliana
cgatgcgtcctggtcgg

SEQ ID NO: 175795 - DNA, 17 bp, Arabidopsis thaliana
cgatgcgtgagcatgca

SEQ ID NO: 175796 - DNA, 17 bp, Arabidopsis thaliana
cgatggtaggatagtgg

SEQ ID NO: 175797 - DNA, 17 bp, Arabidopsis thaliana
cgatggtccctgcggat

SEQ ID NO: 175798 - DNA, 17 bp, Arabidopsis thaliana
cgatggttctcaaccat

SEQ ID NO: 175799 - DNA, 17 bp, Arabidopsis thaliana
cgatgtcggctcttcct

SEQ ID NO: 175800 - DNA, 17 bp, Arabidopsis thaliana
cgatgtcgtccagcggt

SEQ ID NO: 175801 - DNA, 17 bp, Arabidopsis thaliana
cgatgtgctctgtgaac

SEQ ID NO: 175802 - DNA, 17 bp, Arabidopsis thaliana
cgattaagacagcagga

SEQ ID NO: 175803 - DNA, 17 bp, Arabidopsis thaliana
cgattagtaccaaccta

SEQ ID NO: 175804 - DNA, 17 bp, Arabidopsis thaliana
cgattatctcaggaatt

SEQ ID NO: 175805 - DNA, 17 bp, Arabidopsis thaliana
cgattatgtttctgcgg

SEQ ID NO: 175806 - DNA, 17 bp, Arabidopsis thaliana
cgattattccatggtgg

SEQ ID NO: 175807 - DNA, 17 bp, Arabidopsis thaliana
cgattcaagtggtacgt

SEQ ID NO: 175808 - DNA, 17 bp, Arabidopsis thaliana
cgattcacggctgatgc

SEQ ID NO: 175809 - DNA, 17 bp, Arabidopsis thaliana
cgattcactgagattca

SEQ ID NO: 175810 - DNA, 17 bp, Arabidopsis thaliana
cgattcagggcccctat

SEQ ID NO: 175811 - DNA, 17 bp, Arabidopsis thaliana
cgattccaattccctac

SEQ ID NO: 175812 - DNA, 17 bp, Arabidopsis thaliana
cgattccccgtatccga

SEQ ID NO: 175813 - DNA, 17 bp, Arabidopsis thaliana
cgattcccggctggtgc

SEQ ID NO: 175814 - DNA, 17 bp, Arabidopsis thaliana
cgattccggcaggtcgg

SEQ ID NO: 175815 - DNA, 17 bp, Arabidopsis thaliana
cgattccgggtaggacc

SEQ ID NO: 175816 - DNA, 17 bp, Arabidopsis thaliana
cgattccggttgcgtcc

SEQ ID NO: 175817 - DNA, 17 bp, Arabidopsis thaliana
cgattcggggcgtggac

SEQ ID NO: 175818 - DNA, 17 bp, Arabidopsis thaliana
cgattctcggaatgccc

SEQ ID NO: 175819 - DNA, 17 bp, Arabidopsis thaliana
cgattgaatgatccggt

SEQ ID NO: 175820 - DNA, 17 bp, Arabidopsis thaliana
cgattgagccgcgccaa

SEQ ID NO: 175821 - DNA, 17 bp, Arabidopsis thaliana
cgattgcaatgcgatcc

SEQ ID NO: 175822 - DNA, 17 bp, Arabidopsis thaliana
cgattgccgaccctcag

SEQ ID NO: 175823 - DNA, 17 bp, Arabidopsis thaliana
cgattgtgggttcgtgt

SEQ ID NO: 175824 - DNA, 17 bp, Arabidopsis thaliana
cgatttcgtccagcggt

SEQ ID NO: 175825 - DNA, 17 bp, Arabidopsis thaliana
cgatttcgttgtctgtt

SEQ ID NO: 175826 - DNA, 17 bp, Arabidopsis thaliana
cgatttctgtcgggcca

SEQ ID NO: 175827 - DNA, 17 bp, Arabidopsis thaliana
cgatttgacatctactc

SEQ ID NO: 175828 - DNA, 17 bp, Arabidopsis thaliana
cgatttgtctggttaat

SEQ ID NO: 175829 - DNA, 17 bp, Arabidopsis thaliana
cgatttttttcttgcag

SEQ ID NO: 175830 - DNA, 17 bp, Arabidopsis thaliana
cgcaaaaacatcctctg

SEQ ID NO: 175831 - DNA, 17 bp, Arabidopsis thaliana
cgcaaatgcggatatca

SEQ ID NO: 175832 - DNA, 17 bp, Arabidopsis thaliana
cgcaaccgggtcagatg

SEQ ID NO: 175833 - DNA, 17 bp, Arabidopsis thaliana
cgcaacctgtagatgga

SEQ ID NO: 175834 - DNA, 17 bp, Arabidopsis thaliana
cgcaacgccctcgacct

SEQ ID NO: 175835 - DNA, 17 bp, Arabidopsis thaliana
cgcaagacatagtcacg

SEQ ID NO: 175836 - DNA, 17 bp, Arabidopsis thaliana
cgcaaggaagctgattg

SEQ ID NO: 175837 - DNA, 17 bp, Arabidopsis thaliana
cgcaagttgcgccccaa

SEQ ID NO: 175838 - DNA, 17 bp, Arabidopsis thaliana
cgcaagttgtccttggc

SEQ ID NO: 175839 - DNA, 17 bp, Arabidopsis thaliana
cgcaatgaacgctaacc

SEQ ID NO: 175840 - DNA, 17 bp, Arabidopsis thaliana
cgcaatgtgatttctgc

SEQ ID NO: 175841 - DNA, 17 bp, Arabidopsis thaliana
cgcacaattggtcatcg

SEQ ID NO: 175842 - DNA, 17 bp, Arabidopsis thaliana
cgcacccgaacagaaca

SEQ ID NO: 175843 - DNA, 17 bp, Arabidopsis thaliana
cgcaccctgtagatgga

SEQ ID NO: 175844 - DNA, 17 bp, Arabidopsis thaliana
cgcaccctgtagatgta

SEQ ID NO: 175845 - DNA, 17 bp, Arabidopsis thaliana
cgcaccgagaattcggg

SEQ ID NO: 175846 - DNA, 17 bp, Arabidopsis thaliana
cgcacctggttgccgac

SEQ ID NO: 175847 - DNA, 17 bp, Arabidopsis thaliana
cgcacctgtagatggat

SEQ ID NO: 175848 - DNA, 17 bp, Arabidopsis thaliana
cgcacggcggtctgaca

SEQ ID NO: 175849 - DNA, 17 bp, Arabidopsis thaliana
cgcacggtagcttcgcg

SEQ ID NO: 175850 - DNA, 17 bp, Arabidopsis thaliana
cgcactgtagatggatc

SEQ ID NO: 175851 - DNA, 17 bp, Arabidopsis thaliana
cgcagacaaaggatagc

SEQ ID NO: 175852 - DNA, 17 bp, Arabidopsis thaliana
cgcagccatgtggtgag

SEQ ID NO: 175853 - DNA, 17 bp, Arabidopsis thaliana
cgcagccgtgtggtgag

SEQ ID NO: 175854 - DNA, 17 bp, Arabidopsis thaliana
cgcagcctgtagatgga

SEQ ID NO: 175855 - DNA, 17 bp, Arabidopsis thaliana
cgcagcgatactgacgt

SEQ ID NO: 175856 - DNA, 17 bp, Arabidopsis thaliana
cgcaggctccactcctg

SEQ ID NO: 175857 - DNA, 17 bp, Arabidopsis thaliana
cgcaggggccatgctaa

SEQ ID NO: 175858 - DNA, 17 bp, Arabidopsis thaliana
cgcaggtgtcctaagat

SEQ ID NO: 175859 - DNA, 17 bp, Arabidopsis thaliana
cgcaggtgtcctaaggg

SEQ ID NO: 175860 - DNA, 17 bp, Arabidopsis thaliana
cgcaggttcacctacgg

SEQ ID NO: 175861 - DNA, 17 bp, Arabidopsis thaliana
cgcagtctctttggcta

SEQ ID NO: 175862 - DNA, 17 bp, Arabidopsis thaliana
cgcagtggattagcgct

SEQ ID NO: 175863 - DNA, 17 bp, Arabidopsis thaliana
cgcagtgggctgcgtgc

SEQ ID NO: 175864 - DNA, 17 bp, Arabidopsis thaliana
cgcagttaagcgtgctt

SEQ ID NO: 175865 - DNA, 17 bp, Arabidopsis thaliana
cgcagttgcgccccaag

SEQ ID NO: 175866 - DNA, 17 bp, Arabidopsis thaliana
cgcagttgtccaacgta

SEQ ID NO: 175867 - DNA, 17 bp, Arabidopsis thaliana
cgcatacccgatccaag

SEQ ID NO: 175868 - DNA, 17 bp, Arabidopsis thaliana
cgcatcagcaaaggatg

SEQ ID NO: 175869 - DNA, 17 bp, Arabidopsis thaliana
cgcatccagtagatgga

SEQ ID NO: 175870 - DNA, 17 bp, Arabidopsis thaliana
cgcatcccagacggatc

SEQ ID NO: 175871 - DNA, 17 bp, Arabidopsis thaliana
cgcatcccgtagatgca

SEQ ID NO: 175872 - DNA, 17 bp, Arabidopsis thaliana
cgcatcccgtagatgga

SEQ ID NO: 175873 - DNA, 17 bp, Arabidopsis thaliana
cgcatccctgatggatc

SEQ ID NO: 175874 - DNA, 17 bp, Arabidopsis thaliana
cgcatccggtagaggga

SEQ ID NO: 175875 - DNA, 17 bp, Arabidopsis thaliana
cgcatccggtagatgga

SEQ ID NO: 175876 - DNA, 17 bp, Arabidopsis thaliana
cgcatcctatagatgga

SEQ ID NO: 175877 - DNA, 17 bp, Arabidopsis thaliana
cgcatcctgaagatgga

SEQ ID NO: 175878 - DNA, 17 bp, Arabidopsis thaliana
cgcatcctgagatggat

SEQ ID NO: 175879 - DNA, 17 bp, Arabidopsis thaliana
cgcatcctgcagatgga

SEQ ID NO: 175880 - DNA, 17 bp, Arabidopsis thaliana
cgcatcctggagatgga

SEQ ID NO: 175881 - DNA, 17 bp, Arabidopsis thaliana
cgcatcctggatggatc

SEQ ID NO: 175882 - DNA, 17 bp, Arabidopsis thaliana
cgcatcctggtagatgg

SEQ ID NO: 175883 - DNA, 17 bp, Arabidopsis thaliana
cgcatcctgtaaatgga

SEQ ID NO: 175884 - DNA, 17 bp, Arabidopsis thaliana
cgcatcctgtacatgga

SEQ ID NO: 175885 - DNA, 17 bp, Arabidopsis thaliana
cgcatcctgtagaagga

SEQ ID NO: 175886 - DNA, 17 bp, Arabidopsis thaliana
cgcatcctgtagaatcg

SEQ ID NO: 175887 - DNA, 17 bp, Arabidopsis thaliana
cgcatcctgtagaatgg

SEQ ID NO: 175888 - DNA, 17 bp, Arabidopsis thaliana
cgcatcctgtagaattg

SEQ ID NO: 175889 - DNA, 17 bp, Arabidopsis thaliana
cgcatcctgtagacgga

SEQ ID NO: 175890 - DNA, 17 bp, Arabidopsis thaliana
cgcatcctgtagagaga

SEQ ID NO: 175891 - DNA, 17 bp, Arabidopsis thaliana
cgcatcctgtagaggga

SEQ ID NO: 175892 - DNA, 17 bp, Arabidopsis thaliana
cgcatcctgtagataga

SEQ ID NO: 175893 - DNA, 17 bp, Arabidopsis thaliana
cgcatcctgtagatcat

SEQ ID NO: 175894 - DNA, 17 bp, Arabidopsis thaliana
cgcatcctgtagatcga

SEQ ID NO: 175895 - DNA, 17 bp, Arabidopsis thaliana
cgcatcctgtagatgaa

SEQ ID NO: 175896 - DNA, 17 bp, Arabidopsis thaliana
cgcatcctgtagatgca

SEQ ID NO: 175897 - DNA, 17 bp, Arabidopsis thaliana
cgcatcctgtagatgga

SEQ ID NO: 175898 - DNA, 17 bp, Arabidopsis thaliana
cgcatcctgtagatggg

SEQ ID NO: 175899 - DNA, 17 bp, Arabidopsis thaliana
cgcatcctgtagatggt

SEQ ID NO: 175900 - DNA, 17 bp, Arabidopsis thaliana
cgcatcctgtagatgta

SEQ ID NO: 175901 - DNA, 17 bp, Arabidopsis thaliana
cgcatcctgtagattgt

SEQ ID NO: 175902 - DNA, 17 bp, Arabidopsis thaliana
cgcatcctgtagggatc

SEQ ID NO: 175903 - DNA, 17 bp, Arabidopsis thaliana
cgcatcctgtagtagga

SEQ ID NO: 175904 - DNA, 17 bp, Arabidopsis thaliana
cgcatcctgtagtagtt

SEQ ID NO: 175905 - DNA, 17 bp, Arabidopsis thaliana
cgcatcctgtatggatc

SEQ ID NO: 175906 - DNA, 17 bp, Arabidopsis thaliana
cgcatcctgtggatgga

SEQ ID NO: 175907 - DNA, 17 bp, Arabidopsis thaliana
cgcatcctgttgatgga

SEQ ID NO: 175908 - DNA, 17 bp, Arabidopsis thaliana
cgcatctagatggatca

SEQ ID NO: 175909 - DNA, 17 bp, Arabidopsis thaliana
cgcatctcttccgcccc

SEQ ID NO: 175910 - DNA, 17 bp, Arabidopsis thaliana
cgcatctgtagagggat

SEQ ID NO: 175911 - DNA, 17 bp, Arabidopsis thaliana
cgcatctgtagatggat

SEQ ID NO: 175912 - DNA, 17 bp, Arabidopsis thaliana
cgcatcttgtagatgga

SEQ ID NO: 175913 - DNA, 17 bp, Arabidopsis thaliana
cgcatgcgcccgccgcc

SEQ ID NO: 175914 - DNA, 17 bp, Arabidopsis thaliana
cgcatgcgtcgcttcta

SEQ ID NO: 175915 - DNA, 17 bp, Arabidopsis thaliana
cgcatggcctctgtgct

SEQ ID NO: 175916 - DNA, 17 bp, Arabidopsis thaliana
cgcattctgtagataga

SEQ ID NO: 175917 - DNA, 17 bp, Arabidopsis thaliana
cgcattctgtagatgga

SEQ ID NO: 175918 - DNA, 17 bp, Arabidopsis thaliana
cgcatttattagataaa

SEQ ID NO: 175919 - DNA, 17 bp, Arabidopsis thaliana
cgcatttcactgggcca

SEQ ID NO: 175920 - DNA, 17 bp, Arabidopsis thaliana
cgccaaaggagatttgc

SEQ ID NO: 175921 - DNA, 17 bp, Arabidopsis thaliana
cgccaaggagcaccatc

SEQ ID NO: 175922 - DNA, 17 bp, Arabidopsis thaliana
cgccaccgtcaaagtca

SEQ ID NO: 175923 - DNA, 17 bp, Arabidopsis thaliana
cgccactcaaaaggccc

SEQ ID NO: 175924 - DNA, 17 bp, Arabidopsis thaliana
cgccactggcttttcaa

SEQ ID NO: 175925 - DNA, 17 bp, Arabidopsis thaliana
cgccagaatgtcggcct

SEQ ID NO: 175926 - DNA, 17 bp, Arabidopsis thaliana
cgccagcacagaggcca

SEQ ID NO: 175927 - DNA, 17 bp, Arabidopsis thaliana
cgccagcacaggggcca

SEQ ID NO: 175928 - DNA, 17 bp, Arabidopsis thaliana
cgcccacgcaggacaga

SEQ ID NO: 175929 - DNA, 17 bp, Arabidopsis thaliana
cgcccgattgccgaccc

SEQ ID NO: 175930 - DNA, 17 bp, Arabidopsis thaliana
cgcccgcgacgtcgcga

SEQ ID NO: 175931 - DNA, 17 bp, Arabidopsis thaliana
cgcccgctaatagccca

SEQ ID NO: 175932 - DNA, 17 bp, Arabidopsis thaliana
cgcccggttcaggccag

SEQ ID NO: 175933 - DNA, 17 bp, Arabidopsis thaliana
cgccctgtagatggatc

SEQ ID NO: 175934 - DNA, 17 bp, Arabidopsis thaliana
cgccgaaagtgggaagt

SEQ ID NO: 175935 - DNA, 17 bp, Arabidopsis thaliana
cgccgaacggacttagc

SEQ ID NO: 175936 - DNA, 17 bp, Arabidopsis thaliana
cgccgaacggactttag

SEQ ID NO: 175937 - DNA, 17 bp, Arabidopsis thaliana
cgccgaagcgagccttg

SEQ ID NO: 175938 - DNA, 17 bp, Arabidopsis thaliana
cgccgaagcgattggca

SEQ ID NO: 175939 - DNA, 17 bp, Arabidopsis thaliana
cgccgacaagcccgatg

SEQ ID NO: 175940 - DNA, 17 bp, Arabidopsis thaliana
cgccgacccaaacgccc

SEQ ID NO: 175941 - DNA, 17 bp, Arabidopsis thaliana
cgccgaccgaagggaca

SEQ ID NO: 175942 - DNA, 17 bp, Arabidopsis thaliana
cgccgacgtctccggac

SEQ ID NO: 175943 - DNA, 17 bp, Arabidopsis thaliana
cgccgaggcttgagggt

SEQ ID NO: 175944 - DNA, 17 bp, Arabidopsis thaliana
cgccgatgtttgtgccc

SEQ ID NO: 175945 - DNA, 17 bp, Arabidopsis thaliana
cgccgcacgggcccaag

SEQ ID NO: 175946 - DNA, 17 bp, Arabidopsis thaliana
cgccgcagagccagcag

SEQ ID NO: 175947 - DNA, 17 bp, Arabidopsis thaliana
cgccgcccgattgccga

SEQ ID NO: 175948 - DNA, 17 bp, Arabidopsis thaliana
cgccgcccgattgcgat

SEQ ID NO: 175949 - DNA, 17 bp, Arabidopsis thaliana
cgccgctggccgtcacg

SEQ ID NO: 175950 - DNA, 17 bp, Arabidopsis thaliana
cgccggaaaacagagca

SEQ ID NO: 175951 - DNA, 17 bp, Arabidopsis thaliana
cgccggatccgtggttt

SEQ ID NO: 175952 - DNA, 17 bp, Arabidopsis thaliana
cgccgggcggatcatcc

SEQ ID NO: 175953 - DNA, 17 bp, Arabidopsis thaliana
cgccgggggcaggtcgc

SEQ ID NO: 175954 - DNA, 17 bp, Arabidopsis thaliana
cgccgtcagcactgccg

SEQ ID NO: 175955 - DNA, 17 bp, Arabidopsis thaliana
cgccgtggtgaagtgaa

SEQ ID NO: 175956 - DNA, 17 bp, Arabidopsis thaliana
cgccgtgtcgtaagctc

SEQ ID NO: 175957 - DNA, 17 bp, Arabidopsis thaliana
cgccgtttacccgcgct

SEQ ID NO: 175958 - DNA, 17 bp, Arabidopsis thaliana
cgcctcatccgttcgaa

SEQ ID NO: 175959 - DNA, 17 bp, Arabidopsis thaliana
cgcctctaagtcagaaa

SEQ ID NO: 175960 - DNA, 17 bp, Arabidopsis thaliana
cgcctctaagtcagaat

SEQ ID NO: 175961 - DNA, 17 bp, Arabidopsis thaliana
cgcctctaagtcggaat

SEQ ID NO: 175962 - DNA, 17 bp, Arabidopsis thaliana
cgcctgaaaggacaccg

SEQ ID NO: 175963 - DNA, 17 bp, Arabidopsis thaliana
cgcctggctccctgtat

SEQ ID NO: 175964 - DNA, 17 bp, Arabidopsis thaliana
cgccttcgacgccgacc

SEQ ID NO: 175965 - DNA, 17 bp, Arabidopsis thaliana
cgccttgggtgcttgct

SEQ ID NO: 175966 - DNA, 17 bp, Arabidopsis thaliana
cgcctttagcccggatt

SEQ ID NO: 175967 - DNA, 17 bp, Arabidopsis thaliana
cgcctttcgggctaacg

SEQ ID NO: 175968 - DNA, 17 bp, Arabidopsis thaliana
cgcctttctgaacgact

SEQ ID NO: 175969 - DNA, 17 bp, Arabidopsis thaliana
cgcctttgcaaagacgg

SEQ ID NO: 175970 - DNA, 17 bp, Arabidopsis thaliana
cgcctttggtgtgcatt

SEQ ID NO: 175971 - DNA, 17 bp, Arabidopsis thaliana
cgcgaaaagcattttag

SEQ ID NO: 175972 - DNA, 17 bp, Arabidopsis thaliana
cgcgaaatccatcattg

SEQ ID NO: 175973 - DNA, 17 bp, Arabidopsis thaliana
cgcgaaatctatttcag

SEQ ID NO: 175974 - DNA, 17 bp, Arabidopsis thaliana
cgcgaagctaccgtccg

SEQ ID NO: 175975 - DNA, 17 bp, Arabidopsis thaliana
cgcgaagctaccgtgcg

SEQ ID NO: 175976 - DNA, 17 bp, Arabidopsis thaliana
cgcgacatcgcgagaaa

SEQ ID NO: 175977 - DNA, 17 bp, Arabidopsis thaliana
cgcgacatcgcgagaag

SEQ ID NO: 175978 - DNA, 17 bp, Arabidopsis thaliana
cgcgacctatacccacc

SEQ ID NO: 175979 - DNA, 17 bp, Arabidopsis thaliana
cgcgaccttcaatcccg

SEQ ID NO: 175980 - DNA, 17 bp, Arabidopsis thaliana
cgcgacgatacctcccg

SEQ ID NO: 175981 - DNA, 17 bp, Arabidopsis thaliana
cgcgacggatctcgaga

SEQ ID NO: 175982 - DNA, 17 bp, Arabidopsis thaliana
cgcgacggggtattgta

SEQ ID NO: 175983 - DNA, 17 bp, Arabidopsis thaliana
cgcgacggggtatttaa

SEQ ID NO: 175984 - DNA, 17 bp, Arabidopsis thaliana
cgcgacgtcgcgagaaa

SEQ ID NO: 175985 - DNA, 17 bp, Arabidopsis thaliana
cgcgacgtcgcgagaag

SEQ ID NO: 175986 - DNA, 17 bp, Arabidopsis thaliana
cgcgacgtcgcgagcga

SEQ ID NO: 175987 - DNA, 17 bp, Arabidopsis thaliana
cgcgacgtcgcgggcgg

SEQ ID NO: 175988 - DNA, 17 bp, Arabidopsis thaliana
cgcgagagagcagagcg

SEQ ID NO: 175989 - DNA, 17 bp, Arabidopsis thaliana
cgcgaggctaccgtgcg

SEQ ID NO: 175990 - DNA, 17 bp, Arabidopsis thaliana
cgcgaggtcggtgcatc

SEQ ID NO: 175991 - DNA, 17 bp, Arabidopsis thaliana
cgcgagttctatcgggt

SEQ ID NO: 175992 - DNA, 17 bp, Arabidopsis thaliana
cgcgatatcgctcttca

SEQ ID NO: 175993 - DNA, 17 bp, Arabidopsis thaliana
cgcgattcttccccaac

SEQ ID NO: 175994 - DNA, 17 bp, Arabidopsis thaliana
cgcgattcttcttcaac

SEQ ID NO: 175995 - DNA, 17 bp, Arabidopsis thaliana
cgcgcacagcgaagata

SEQ ID NO: 175996 - DNA, 17 bp, Arabidopsis thaliana
cgcgcacgacaagaccg

SEQ ID NO: 175997 - DNA, 17 bp, Arabidopsis thaliana
cgcgcctaacggcgtgc

SEQ ID NO: 175998 - DNA, 17 bp, Arabidopsis thaliana
cgcgcctgtagatggat

SEQ ID NO: 175999 - DNA, 17 bp, Arabidopsis thaliana
cgcgcgacctatacccg

SEQ ID NO: 176000 - DNA, 17 bp, Arabidopsis thaliana
cgcgcggccgtggcggc

SEQ ID NO: 176001 - DNA, 17 bp, Arabidopsis thaliana
cgcgcgtgcggcccaga

SEQ ID NO: 176002 - DNA, 17 bp, Arabidopsis thaliana
cgcgctacactgatgct

SEQ ID NO: 176003 - DNA, 17 bp, Arabidopsis thaliana
cgcgctacactgatgta

SEQ ID NO: 176004 - DNA, 17 bp, Arabidopsis thaliana
cgcgcttcactgatgta

SEQ ID NO: 176005 - DNA, 17 bp, Arabidopsis thaliana
cgcgcttcggcaaggat

SEQ ID NO: 176006 - DNA, 17 bp, Arabidopsis thaliana
cgcgcttggttgaaaag

SEQ ID NO: 176007 - DNA, 17 bp, Arabidopsis thaliana
cgcggagacggcggcgg

SEQ ID NO: 176008 - DNA, 17 bp, Arabidopsis thaliana
cgcggaggagttccaca

SEQ ID NO: 176009 - DNA, 17 bp, Arabidopsis thaliana
cgcggatgtagccaagt

SEQ ID NO: 176010 - DNA, 17 bp, Arabidopsis thaliana
cgcggattacggtggcg

SEQ ID NO: 176011 - DNA, 17 bp, Arabidopsis thaliana
cgcggatttgttactga

SEQ ID NO: 176012 - DNA, 17 bp, Arabidopsis thaliana
cgcggcgacgtgggtgg

SEQ ID NO: 176013 - DNA, 17 bp, Arabidopsis thaliana
cgcggctcttctcgggt

SEQ ID NO: 176014 - DNA, 17 bp, Arabidopsis thaliana
cgcggcttctccttcgt

SEQ ID NO: 176015 - DNA, 17 bp, Arabidopsis thaliana
cgcgggcaaaggtgtaa

SEQ ID NO: 176016 - DNA, 17 bp, Arabidopsis thaliana
cgcgggcggacccgggt

SEQ ID NO: 176017 - DNA, 17 bp, Arabidopsis thaliana
cgcgggcggcgaaccac

SEQ ID NO: 176018 - DNA, 17 bp, Arabidopsis thaliana
cgcgggctgtttcatag

SEQ ID NO: 176019 - DNA, 17 bp, Arabidopsis thaliana
cgcgggcttgggtgtaa

SEQ ID NO: 176020 - DNA, 17 bp, Arabidopsis thaliana
cgcggggtagagcagta

SEQ ID NO: 176021 - DNA, 17 bp, Arabidopsis thaliana
cgcggggtagagcagtt

SEQ ID NO: 176022 - DNA, 17 bp, Arabidopsis thaliana
cgcggggttaaggtgcc

SEQ ID NO: 176023 - DNA, 17 bp, Arabidopsis thaliana
cgcgggtaaacggcggg

SEQ ID NO: 176024 - DNA, 17 bp, Arabidopsis thaliana
cgcgggtgcaccgccga

SEQ ID NO: 176025 - DNA, 17 bp, Arabidopsis thaliana
cgcgtatcggcatgatc

SEQ ID NO: 176026 - DNA, 17 bp, Arabidopsis thaliana
cgcgtcctgtagatgga

SEQ ID NO: 176027 - DNA, 17 bp, Arabidopsis thaliana
cgcgtcgcgatagtaat

SEQ ID NO: 176028 - DNA, 17 bp, Arabidopsis thaliana
cgcgtgaggctggtttc

SEQ ID NO: 176029 - DNA, 17 bp, Arabidopsis thaliana
cgcgtgccggccgggga

SEQ ID NO: 176030 - DNA, 17 bp, Arabidopsis thaliana
cgcgtgccggccggggg

SEQ ID NO: 176031 - DNA, 17 bp, Arabidopsis thaliana
cgcgtgcggcccagaac

SEQ ID NO: 176032 - DNA, 17 bp, Arabidopsis thaliana
cgcgtgcggcgggtatc

SEQ ID NO: 176033 - DNA, 17 bp, Arabidopsis thaliana
cgcgttctttgtcgtcc

SEQ ID NO: 176034 - DNA, 17 bp, Arabidopsis thaliana
cgcgttgactacgtccc

SEQ ID NO: 176035 - DNA, 17 bp, Arabidopsis thaliana
cgctaaaggatttcgaa

SEQ ID NO: 176036 - DNA, 17 bp, Arabidopsis thaliana
cgctaagattcgaaaat

SEQ ID NO: 176037 - DNA, 17 bp, Arabidopsis thaliana
cgctaagtggcatacgc

SEQ ID NO: 176038 - DNA, 17 bp, Arabidopsis thaliana
cgctacaatgaggaggg

SEQ ID NO: 176039 - DNA, 17 bp, Arabidopsis thaliana
cgctacactgatgtatt

SEQ ID NO: 176040 - DNA, 17 bp, Arabidopsis thaliana
cgctacccatcctgagt

SEQ ID NO: 176041 - DNA, 17 bp, Arabidopsis thaliana
cgctataactcaacgga

SEQ ID NO: 176042 - DNA, 17 bp, Arabidopsis thaliana
cgctatccaatttgagt

SEQ ID NO: 176043 - DNA, 17 bp, Arabidopsis thaliana
cgctatccatcctgaga

SEQ ID NO: 176044 - DNA, 17 bp, Arabidopsis thaliana
cgctatccatcctgagc

SEQ ID NO: 176045 - DNA, 17 bp, Arabidopsis thaliana
cgctatccatcctgagt

SEQ ID NO: 176046 - DNA, 17 bp, Arabidopsis thaliana
cgctatccatcctgcct

SEQ ID NO: 176047 - DNA, 17 bp, Arabidopsis thaliana
cgctatccatcctgggt

SEQ ID NO: 176048 - DNA, 17 bp, Arabidopsis thaliana
cgctatccatcctgtgt

SEQ ID NO: 176049 - DNA, 17 bp, Arabidopsis thaliana
cgctatccatccttagt

SEQ ID NO: 176050 - DNA, 17 bp, Arabidopsis thaliana
cgctatccatctcgagt

SEQ ID NO: 176051 - DNA, 17 bp, Arabidopsis thaliana
cgctatccatcttgagt

SEQ ID NO: 176052 - DNA, 17 bp, Arabidopsis thaliana
cgctatccattctgagt

SEQ ID NO: 176053 - DNA, 17 bp, Arabidopsis thaliana
cgctatccattgagttt

SEQ ID NO: 176054 - DNA, 17 bp, Arabidopsis thaliana
cgctatccgtcctgagt

SEQ ID NO: 176055 - DNA, 17 bp, Arabidopsis thaliana
cgctatgttggacttag

SEQ ID NO: 176056 - DNA, 17 bp, Arabidopsis thaliana
cgctattcatcctgagt

SEQ ID NO: 176057 - DNA, 17 bp, Arabidopsis thaliana
cgctatttatcctgagt

SEQ ID NO: 176058 - DNA, 17 bp, Arabidopsis thaliana
cgctcaaagtatagaaa

SEQ ID NO: 176059 - DNA, 17 bp, Arabidopsis thaliana
cgctccaggcgtccttg

SEQ ID NO: 176060 - DNA, 17 bp, Arabidopsis thaliana
cgctccctgtagatgga

SEQ ID NO: 176061 - DNA, 17 bp, Arabidopsis thaliana
cgctcctgtagatggat

SEQ ID NO: 176062 - DNA, 17 bp, Arabidopsis thaliana
cgctcgatgatgagttc

SEQ ID NO: 176063 - DNA, 17 bp, Arabidopsis thaliana
cgctcgccgcccgattg

SEQ ID NO: 176064 - DNA, 17 bp, Arabidopsis thaliana
cgctcgggcatgtttga

SEQ ID NO: 176065 - DNA, 17 bp, Arabidopsis thaliana
cgctctccagtaacaaa

SEQ ID NO: 176066 - DNA, 17 bp, Arabidopsis thaliana
cgctctgctgggcggac

SEQ ID NO: 176067 - DNA, 17 bp, Arabidopsis thaliana
cgctctggatacattag

SEQ ID NO: 176068 - DNA, 17 bp, Arabidopsis thaliana
cgctgacagccgacggg

SEQ ID NO: 176069 - DNA, 17 bp, Arabidopsis thaliana
cgctgattgctcagacc

SEQ ID NO: 176070 - DNA, 17 bp, Arabidopsis thaliana
cgctgccgctagtccga

SEQ ID NO: 176071 - DNA, 17 bp, Arabidopsis thaliana
cgctgccgtgatcgatc

SEQ ID NO: 176072 - DNA, 17 bp, Arabidopsis thaliana
cgctgccgtgatcgtgg

SEQ ID NO: 176073 - DNA, 17 bp, Arabidopsis thaliana
cgctgcgaaacccattc

SEQ ID NO: 176074 - DNA, 17 bp, Arabidopsis thaliana
cgctgctacatgtatgc

SEQ ID NO: 176075 - DNA, 17 bp, Arabidopsis thaliana
cgctgctctgtgaaacc

SEQ ID NO: 176076 - DNA, 17 bp, Arabidopsis thaliana
cgctggattatgactga

SEQ ID NO: 176077 - DNA, 17 bp, Arabidopsis thaliana
cgctggtgcactccgcc

SEQ ID NO: 176078 - DNA, 17 bp, Arabidopsis thaliana
cgctgtctacgagtcgg

SEQ ID NO: 176079 - DNA, 17 bp, Arabidopsis thaliana
cgctgtttggacacagg

SEQ ID NO: 176080 - DNA, 17 bp, Arabidopsis thaliana
cgcttacgagtgtgatt

SEQ ID NO: 176081 - DNA, 17 bp, Arabidopsis thaliana
cgcttcatcctgagttt

SEQ ID NO: 176082 - DNA, 17 bp, Arabidopsis thaliana
cgcttccgccgaacgga

SEQ ID NO: 176083 - DNA, 17 bp, Arabidopsis thaliana
cgcttccgcctaacgga

SEQ ID NO: 176084 - DNA, 17 bp, Arabidopsis thaliana
cgcttcctgtagatgtc

SEQ ID NO: 176085 - DNA, 17 bp, Arabidopsis thaliana
cgcttcgcaggaggccc

SEQ ID NO: 176086 - DNA, 17 bp, Arabidopsis thaliana
cgcttctagcccggatt

SEQ ID NO: 176087 - DNA, 17 bp, Arabidopsis thaliana
cgcttctatcctgagtt

SEQ ID NO: 176088 - DNA, 17 bp, Arabidopsis thaliana
cgcttgaggagcgagtg

SEQ ID NO: 176089 - DNA, 17 bp, Arabidopsis thaliana
cgcttgccgctggtagt

SEQ ID NO: 176090 - DNA, 17 bp, Arabidopsis thaliana
cgcttggctgccacaaa

SEQ ID NO: 176091 - DNA, 17 bp, Arabidopsis thaliana
cgcttggctgccacaag

SEQ ID NO: 176092 - DNA, 17 bp, Arabidopsis thaliana
cgcttggctgccaccca

SEQ ID NO: 176093 - DNA, 17 bp, Arabidopsis thaliana
cgcttggtacggactta

SEQ ID NO: 176094 - DNA, 17 bp, Arabidopsis thaliana
cgcttggtacggacttc

SEQ ID NO: 176095 - DNA, 17 bp, Arabidopsis thaliana
cgcttggtgcaggtcgg

SEQ ID NO: 176096 - DNA, 17 bp, Arabidopsis thaliana
cgcttgtgaccagactt

SEQ ID NO: 176097 - DNA, 17 bp, Arabidopsis thaliana
cgcttgtggactgcttg

SEQ ID NO: 176098 - DNA, 17 bp, Arabidopsis thaliana
cgcttgtggattgcttg

SEQ ID NO: 176099 - DNA, 17 bp, Arabidopsis thaliana
cgctttcaatccactca

SEQ ID NO: 176100 - DNA, 17 bp, Arabidopsis thaliana
cgctttgccctaagcca

SEQ ID NO: 176101 - DNA, 17 bp, Arabidopsis thaliana
cgctttggccgagtggt

SEQ ID NO: 176102 - DNA, 17 bp, Arabidopsis thaliana
cgctttggttgcgagag

SEQ ID NO: 176103 - DNA, 17 bp, Arabidopsis thaliana
cgctttgtaggattcgt

SEQ ID NO: 176104 - DNA, 17 bp, Arabidopsis thaliana
cgcttttagggttgttt

SEQ ID NO: 176105 - DNA, 17 bp, Arabidopsis thaliana
cggaaaattcaggagaa

SEQ ID NO: 176106 - DNA, 17 bp, Arabidopsis thaliana
cggaagagcccagcact

SEQ ID NO: 176107 - DNA, 17 bp, Arabidopsis thaliana
cggaagattagattgct

SEQ ID NO: 176108 - DNA, 17 bp, Arabidopsis thaliana
cggaagcgtcgttcgga

SEQ ID NO: 176109 - DNA, 17 bp, Arabidopsis thaliana
cggaagcgtcgttcggg

SEQ ID NO: 176110 - DNA, 17 bp, Arabidopsis thaliana
cggaagcgtcgttcgtt

SEQ ID NO: 176111 - DNA, 17 bp, Arabidopsis thaliana
cggaagcgtcgtttgga

SEQ ID NO: 176112 - DNA, 17 bp, Arabidopsis thaliana
cggaagcttcgttcgga

SEQ ID NO: 176113 - DNA, 17 bp, Arabidopsis thaliana
cggaagggcaccaccag

SEQ ID NO: 176114 - DNA, 17 bp, Arabidopsis thaliana
cggaagggcactaccag

SEQ ID NO: 176115 - DNA, 17 bp, Arabidopsis thaliana
cggaaggggtgtatttt

SEQ ID NO: 176116 - DNA, 17 bp, Arabidopsis thaliana
cggaagtcctaaggcca

SEQ ID NO: 176117 - DNA, 17 bp, Arabidopsis thaliana
cggaagtctgaatcata

SEQ ID NO: 176118 - DNA, 17 bp, Arabidopsis thaliana
cggaatattgttgtgac

SEQ ID NO: 176119 - DNA, 17 bp, Arabidopsis thaliana
cggaatcgtcgttcgga

SEQ ID NO: 176120 - DNA, 17 bp, Arabidopsis thaliana
cggacaacggttcgacg

SEQ ID NO: 176121 - DNA, 17 bp, Arabidopsis thaliana
cggacacagtgaggcgg

SEQ ID NO: 176122 - DNA, 17 bp, Arabidopsis thaliana
cggacaccacgcgacgt

SEQ ID NO: 176123 - DNA, 17 bp, Arabidopsis thaliana
cggacaccagactgcag

SEQ ID NO: 176124 - DNA, 17 bp, Arabidopsis thaliana
cggacactacgctgcta

SEQ ID NO: 176125 - DNA, 17 bp, Arabidopsis thaliana
cggacccgggcgaagcc

SEQ ID NO: 176126 - DNA, 17 bp, Arabidopsis thaliana
cggacccgggctcagac

SEQ ID NO: 176127 - DNA, 17 bp, Arabidopsis thaliana
cggacccggtcgacgat

SEQ ID NO: 176128 - DNA, 17 bp, Arabidopsis thaliana
cggaccctgtcgcacca

SEQ ID NO: 176129 - DNA, 17 bp, Arabidopsis thaliana
cggacgcgagttctatc

SEQ ID NO: 176130 - DNA, 17 bp, Arabidopsis thaliana
cggacgggaagtggtgt

SEQ ID NO: 176131 - DNA, 17 bp, Arabidopsis thaliana
cggacgtcaaacatggg

SEQ ID NO: 176132 - DNA, 17 bp, Arabidopsis thaliana
cggactagtggcagcgg

SEQ ID NO: 176133 - DNA, 17 bp, Arabidopsis thaliana
cggactccctaacgttg

SEQ ID NO: 176134 - DNA, 17 bp, Arabidopsis thaliana
cggactgggaacggctc

SEQ ID NO: 176135 - DNA, 17 bp, Arabidopsis thaliana
cggactgggatccccgg

SEQ ID NO: 176136 - DNA, 17 bp, Arabidopsis thaliana
cggacttagccaacggc

SEQ ID NO: 176137 - DNA, 17 bp, Arabidopsis thaliana
cggacttggaatcgtcg

SEQ ID NO: 176138 - DNA, 17 bp, Arabidopsis thaliana
cggagacggcggcgggg

SEQ ID NO: 176139 - DNA, 17 bp, Arabidopsis thaliana
cggagacgtcggcgggg

SEQ ID NO: 176140 - DNA, 17 bp, Arabidopsis thaliana
cggagactacgaaggct

SEQ ID NO: 176141 - DNA, 17 bp, Arabidopsis thaliana
cggagagattacagttg

SEQ ID NO: 176142 - DNA, 17 bp, Arabidopsis thaliana
cggagcaccgacaaaag

SEQ ID NO: 176143 - DNA, 17 bp, Arabidopsis thaliana
cggagcatcaattttaa

SEQ ID NO: 176144 - DNA, 17 bp, Arabidopsis thaliana
cggagccttttcagcag

SEQ ID NO: 176145 - DNA, 17 bp, Arabidopsis thaliana
cggagctaacctttctt

SEQ ID NO: 176146 - DNA, 17 bp, Arabidopsis thaliana
cggagctatcactgtct

SEQ ID NO: 176147 - DNA, 17 bp, Arabidopsis thaliana
cggaggaccgagtgccg

SEQ ID NO: 176148 - DNA, 17 bp, Arabidopsis thaliana
cggaggaggtggatgga

SEQ ID NO: 176149 - DNA, 17 bp, Arabidopsis thaliana
cggaggaggtggatttg

SEQ ID NO: 176150 - DNA, 17 bp, Arabidopsis thaliana
cggaggccttgtcggtg

SEQ ID NO: 176151 - DNA, 17 bp, Arabidopsis thaliana
cggaggggtgcttagct

SEQ ID NO: 176152 - DNA, 17 bp, Arabidopsis thaliana
cggaggtcatatcatct

SEQ ID NO: 176153 - DNA, 17 bp, Arabidopsis thaliana
cggaggtggaggcggat

SEQ ID NO: 176154 - DNA, 17 bp, Arabidopsis thaliana
cggaggtgtgcgaaggt

SEQ ID NO: 176155 - DNA, 17 bp, Arabidopsis thaliana
cggagttggtgatgaag

SEQ ID NO: 176156 - DNA, 17 bp, Arabidopsis thaliana
cggataagtggacggtt

SEQ ID NO: 176157 - DNA, 17 bp, Arabidopsis thaliana
cggatagatggtaaggg

SEQ ID NO: 176158 - DNA, 17 bp, Arabidopsis thaliana
cggatatctcccaattt

SEQ ID NO: 176159 - DNA, 17 bp, Arabidopsis thaliana
cggatatctcggctctc

SEQ ID NO: 176160 - DNA, 17 bp, Arabidopsis thaliana
cggatgcggaaaagttg

SEQ ID NO: 176161 - DNA, 17 bp, Arabidopsis thaliana
cggatgctaacgcaatg

SEQ ID NO: 176162 - DNA, 17 bp, Arabidopsis thaliana
cggatgtagccaagtgg

SEQ ID NO: 176163 - DNA, 17 bp, Arabidopsis thaliana
cggatgtcagcggttcg

SEQ ID NO: 176164 - DNA, 17 bp, Arabidopsis thaliana
cggatgtctcggtgcgc

SEQ ID NO: 176165 - DNA, 17 bp, Arabidopsis thaliana
cggatttaggccaaccg

SEQ ID NO: 176166 - DNA, 17 bp, Arabidopsis thaliana
cggattttcaagggccg

SEQ ID NO: 176167 - DNA, 17 bp, Arabidopsis thaliana
cggcaacgttagggagt

SEQ ID NO: 176168 - DNA, 17 bp, Arabidopsis thaliana
cggcaaggatgctggcg

SEQ ID NO: 176169 - DNA, 17 bp, Arabidopsis thaliana
cggcaagttgaccttgg

SEQ ID NO: 176170 - DNA, 17 bp, Arabidopsis thaliana
cggcaatcgggcggcgg

SEQ ID NO: 176171 - DNA, 17 bp, Arabidopsis thaliana
cggcaatttggtattgc

SEQ ID NO: 176172 - DNA, 17 bp, Arabidopsis thaliana
cggcacttgcacatggg

SEQ ID NO: 176173 - DNA, 17 bp, Arabidopsis thaliana
cggcaggagacgctggc

SEQ ID NO: 176174 - DNA, 17 bp, Arabidopsis thaliana
cggcattacggtaaaca

SEQ ID NO: 176175 - DNA, 17 bp, Arabidopsis thaliana
cggccaaggatgacttg

SEQ ID NO: 176176 - DNA, 17 bp, Arabidopsis thaliana
cggccaaggtgcgaact

SEQ ID NO: 176177 - DNA, 17 bp, Arabidopsis thaliana
cggccaaggtgtgaact

SEQ ID NO: 176178 - DNA, 17 bp, Arabidopsis thaliana
cggccagaaggcttggg

SEQ ID NO: 176179 - DNA, 17 bp, Arabidopsis thaliana
cggccaggctacaatca

SEQ ID NO: 176180 - DNA, 17 bp, Arabidopsis thaliana
cggcccatagctcagtg

SEQ ID NO: 176181 - DNA, 17 bp, Arabidopsis thaliana
cggccctctctgggacc

SEQ ID NO: 176182 - DNA, 17 bp, Arabidopsis thaliana
cggccggcttcttagag

SEQ ID NO: 176183 - DNA, 17 bp, Arabidopsis thaliana
cggccgggggcttccag

SEQ ID NO: 176184 - DNA, 17 bp, Arabidopsis thaliana
cggccggtccgcccttg

SEQ ID NO: 176185 - DNA, 17 bp, Arabidopsis thaliana
cggccggtccgcctgcc

SEQ ID NO: 176186 - DNA, 17 bp, Arabidopsis thaliana
cggccggtccgccttgg

SEQ ID NO: 176187 - DNA, 17 bp, Arabidopsis thaliana
cggccggtccgcctttg

SEQ ID NO: 176188 - DNA, 17 bp, Arabidopsis thaliana
cggcctcgcaggatttg

SEQ ID NO: 176189 - DNA, 17 bp, Arabidopsis thaliana
cggcgaatccgacaggt

SEQ ID NO: 176190 - DNA, 17 bp, Arabidopsis thaliana
cggcgacgtgggtggtt

SEQ ID NO: 176191 - DNA, 17 bp, Arabidopsis thaliana
cggcgagcgaaccggga

SEQ ID NO: 176192 - DNA, 17 bp, Arabidopsis thaliana
cggcgaggatgttggca

SEQ ID NO: 176193 - DNA, 17 bp, Arabidopsis thaliana
cggcgaggtagtgacga

SEQ ID NO: 176194 - DNA, 17 bp, Arabidopsis thaliana
cggcgagtgaggtggtg

SEQ ID NO: 176195 - DNA, 17 bp, Arabidopsis thaliana
cggcgatacgctcctgg

SEQ ID NO: 176196 - DNA, 17 bp, Arabidopsis thaliana
cggcgatgcgtcctggt

SEQ ID NO: 176197 - DNA, 17 bp, Arabidopsis thaliana
cggcggaagcgtcgttc

SEQ ID NO: 176198 - DNA, 17 bp, Arabidopsis thaliana
cggcggccatgactacg

SEQ ID NO: 176199 - DNA, 17 bp, Arabidopsis thaliana
cggcggcccttgaaaat

SEQ ID NO: 176200 - DNA, 17 bp, Arabidopsis thaliana
cggcggcgatgtgagcg

SEQ ID NO: 176201 - DNA, 17 bp, Arabidopsis thaliana
cggcggcggcggaggaa

SEQ ID NO: 176202 - DNA, 17 bp, Arabidopsis thaliana
cggcgggcaaggaatcg

SEQ ID NO: 176203 - DNA, 17 bp, Arabidopsis thaliana
cggcgggggcctcggga

SEQ ID NO: 176204 - DNA, 17 bp, Arabidopsis thaliana
cggcgggtagaatcctt

SEQ ID NO: 176205 - DNA, 17 bp, Arabidopsis thaliana
cggcggtcagttccgac

SEQ ID NO: 176206 - DNA, 17 bp, Arabidopsis thaliana
cggcggtctgacaggtt

SEQ ID NO: 176207 - DNA, 17 bp, Arabidopsis thaliana
cggcggttgagcatttt

SEQ ID NO: 176208 - DNA, 17 bp, Arabidopsis thaliana
cggcgtatgagtggtga

SEQ ID NO: 176209 - DNA, 17 bp, Arabidopsis thaliana
cggctaccacatccaag

SEQ ID NO: 176210 - DNA, 17 bp, Arabidopsis thaliana
cggctcagccggaggta

SEQ ID NO: 176211 - DNA, 17 bp, Arabidopsis thaliana
cggctcagtgaggcctt

SEQ ID NO: 176212 - DNA, 17 bp, Arabidopsis thaliana
cggctccgacgacagct

SEQ ID NO: 176213 - DNA, 17 bp, Arabidopsis thaliana
cggctctcgcatcgatg

SEQ ID NO: 176214 - DNA, 17 bp, Arabidopsis thaliana
cggctctctcgggagct

SEQ ID NO: 176215 - DNA, 17 bp, Arabidopsis thaliana
cggctctgataccaatt

SEQ ID NO: 176216 - DNA, 17 bp, Arabidopsis thaliana
cggctgagccgtttcca

SEQ ID NO: 176217 - DNA, 17 bp, Arabidopsis thaliana
cggctgattcttattga

SEQ ID NO: 176218 - DNA, 17 bp, Arabidopsis thaliana
cggctggcagcttcaga

SEQ ID NO: 176219 - DNA, 17 bp, Arabidopsis thaliana
cggcttaagccattagg

SEQ ID NO: 176220 - DNA, 17 bp, Arabidopsis thaliana
cggcttaagccattcat

SEQ ID NO: 176221 - DNA, 17 bp, Arabidopsis thaliana
cggcttctaagaatatt

SEQ ID NO: 176222 - DNA, 17 bp, Arabidopsis thaliana
cggcttcttagagggac

SEQ ID NO: 176223 - DNA, 17 bp, Arabidopsis thaliana
cggcttgtcccttcggt

SEQ ID NO: 176224 - DNA, 17 bp, Arabidopsis thaliana
cggctttccgacggata

SEQ ID NO: 176225 - DNA, 17 bp, Arabidopsis thaliana
cggctttggtaacgtac

SEQ ID NO: 176226 - DNA, 17 bp, Arabidopsis thaliana
cggctttgtgcaaccta

SEQ ID NO: 176227 - DNA, 17 bp, Arabidopsis thaliana
cgggaactcaaccgctt

SEQ ID NO: 176228 - DNA, 17 bp, Arabidopsis thaliana
cgggaagtcctcgtgtt

SEQ ID NO: 176229 - DNA, 17 bp, Arabidopsis thaliana
cgggacactgcgaggtg

SEQ ID NO: 176230 - DNA, 17 bp, Arabidopsis thaliana
cgggacggaagctggtc

SEQ ID NO: 176231 - DNA, 17 bp, Arabidopsis thaliana
cgggacgtggcggttga

SEQ ID NO: 176232 - DNA, 17 bp, Arabidopsis thaliana
cgggactcacggacacg

SEQ ID NO: 176233 - DNA, 17 bp, Arabidopsis thaliana
cgggagaagccaatatg

SEQ ID NO: 176234 - DNA, 17 bp, Arabidopsis thaliana
cgggagggaagcggatg

SEQ ID NO: 176235 - DNA, 17 bp, Arabidopsis thaliana
cgggagggtgctatgct

SEQ ID NO: 176236 - DNA, 17 bp, Arabidopsis thaliana
cgggagggttattccag

SEQ ID NO: 176237 - DNA, 17 bp, Arabidopsis thaliana
cgggaggtggacgctgc

SEQ ID NO: 176238 - DNA, 17 bp, Arabidopsis thaliana
cgggagtcccgtgtgga

SEQ ID NO: 176239 - DNA, 17 bp, Arabidopsis thaliana
cgggatcccatccgctc

SEQ ID NO: 176240 - DNA, 17 bp, Arabidopsis thaliana
cgggatcccgtccgctc

SEQ ID NO: 176241 - DNA, 17 bp, Arabidopsis thaliana
cgggattacgcctctgt

SEQ ID NO: 176242 - DNA, 17 bp, Arabidopsis thaliana
cgggcactacggtgaga

SEQ ID NO: 176243 - DNA, 17 bp, Arabidopsis thaliana
cgggcagagcccgcgtc

SEQ ID NO: 176244 - DNA, 17 bp, Arabidopsis thaliana
cgggcagcgataccatg

SEQ ID NO: 176245 - DNA, 17 bp, Arabidopsis thaliana
cgggcgaggacattgtc

SEQ ID NO: 176246 - DNA, 17 bp, Arabidopsis thaliana
cgggcggaggacattgt

SEQ ID NO: 176247 - DNA, 17 bp, Arabidopsis thaliana
cgggcggcgaaccaccc

SEQ ID NO: 176248 - DNA, 17 bp, Arabidopsis thaliana
cgggcggcgaatcatcc

SEQ ID NO: 176249 - DNA, 17 bp, Arabidopsis thaliana
cgggctagaagcgacgc

SEQ ID NO: 176250 - DNA, 17 bp, Arabidopsis thaliana
cgggctatacgccaacg

SEQ ID NO: 176251 - DNA, 17 bp, Arabidopsis thaliana
cgggctcagacaccaat

SEQ ID NO: 176252 - DNA, 17 bp, Arabidopsis thaliana
cgggctcggatcccggc

SEQ ID NO: 176253 - DNA, 17 bp, Arabidopsis thaliana
cgggctctttcggtcgg

SEQ ID NO: 176254 - DNA, 17 bp, Arabidopsis thaliana
cgggcttggcagaatca

SEQ ID NO: 176255 - DNA, 17 bp, Arabidopsis thaliana
cgggcttttgatacgct

SEQ ID NO: 176256 - DNA, 17 bp, Arabidopsis thaliana
cggggaaacttaccagg

SEQ ID NO: 176257 - DNA, 17 bp, Arabidopsis thaliana
cggggaacggctctctc

SEQ ID NO: 176258 - DNA, 17 bp, Arabidopsis thaliana
cggggaattgccgtgat

SEQ ID NO: 176259 - DNA, 17 bp, Arabidopsis thaliana
cggggaggtagtgacaa

SEQ ID NO: 176260 - DNA, 17 bp, Arabidopsis thaliana
cggggatcgataccccg

SEQ ID NO: 176261 - DNA, 17 bp, Arabidopsis thaliana
cggggcctgtgtttcgt

SEQ ID NO: 176262 - DNA, 17 bp, Arabidopsis thaliana
cggggcgtggaccgacg

SEQ ID NO: 176263 - DNA, 17 bp, Arabidopsis thaliana
cggggctaagcgatcga

SEQ ID NO: 176264 - DNA, 17 bp, Arabidopsis thaliana
cggggctaagcgatctg

SEQ ID NO: 176265 - DNA, 17 bp, Arabidopsis thaliana
cgggggacggactggga

SEQ ID NO: 176266 - DNA, 17 bp, Arabidopsis thaliana
cgggggagtatagtcgc

SEQ ID NO: 176267 - DNA, 17 bp, Arabidopsis thaliana
cgggggagtcgttaacg

SEQ ID NO: 176268 - DNA, 17 bp, Arabidopsis thaliana
cgggggcaggtcgccac

SEQ ID NO: 176269 - DNA, 17 bp, Arabidopsis thaliana
cgggggtcccagttccg

SEQ ID NO: 176270 - DNA, 17 bp, Arabidopsis thaliana
cggggtaaagccagagg

SEQ ID NO: 176271 - DNA, 17 bp, Arabidopsis thaliana
cggggtagagcagtttg

SEQ ID NO: 176272 - DNA, 17 bp, Arabidopsis thaliana
cggggtcgcagtgacca

SEQ ID NO: 176273 - DNA, 17 bp, Arabidopsis thaliana
cggggttttgtgatatc

SEQ ID NO: 176274 - DNA, 17 bp, Arabidopsis thaliana
cgggtagaatcctttgc

SEQ ID NO: 176275 - DNA, 17 bp, Arabidopsis thaliana
cgggtcccaccgggcgt

SEQ ID NO: 176276 - DNA, 17 bp, Arabidopsis thaliana
cgggtcccaccgggtgt

SEQ ID NO: 176277 - DNA, 17 bp, Arabidopsis thaliana
cgggtcccactgggtgt

SEQ ID NO: 176278 - DNA, 17 bp, Arabidopsis thaliana
cgggtcgtgcctccggc

SEQ ID NO: 176279 - DNA, 17 bp, Arabidopsis thaliana
cgggtgacccggggttc

SEQ ID NO: 176280 - DNA, 17 bp, Arabidopsis thaliana
cgggtgacccgggttcg

SEQ ID NO: 176281 - DNA, 17 bp, Arabidopsis thaliana
cgggtgcaccgccgacc

SEQ ID NO: 176282 - DNA, 17 bp, Arabidopsis thaliana
cgggtgcaccgccggcc

SEQ ID NO: 176283 - DNA, 17 bp, Arabidopsis thaliana
cgggtgcggaaaagttg

SEQ ID NO: 176284 - DNA, 17 bp, Arabidopsis thaliana
cgggttcgattcccggc

SEQ ID NO: 176285 - DNA, 17 bp, Arabidopsis thaliana
cgggttcgggccccgcc

SEQ ID NO: 176286 - DNA, 17 bp, Arabidopsis thaliana
cgggttcgtttcccggc

SEQ ID NO: 176287 - DNA, 17 bp, Arabidopsis thaliana
cggtaacacttatttct

SEQ ID NO: 176288 - DNA, 17 bp, Arabidopsis thaliana
cggtaaggcaacgggtt

SEQ ID NO: 176289 - DNA, 17 bp, Arabidopsis thaliana
cggtagcgttctatact

SEQ ID NO: 176290 - DNA, 17 bp, Arabidopsis thaliana
cggtaggagcgacggac

SEQ ID NO: 176291 - DNA, 17 bp, Arabidopsis thaliana
cggtaggagcgacgggc

SEQ ID NO: 176292 - DNA, 17 bp, Arabidopsis thaliana
cggtatgacgatgggga

SEQ ID NO: 176293 - DNA, 17 bp, Arabidopsis thaliana
cggtattgggaaatgga

SEQ ID NO: 176294 - DNA, 17 bp, Arabidopsis thaliana
cggtcagcatcatcagt

SEQ ID NO: 176295 - DNA, 17 bp, Arabidopsis thaliana
cggtccacgctcaccgc

SEQ ID NO: 176296 - DNA, 17 bp, Arabidopsis thaliana
cggtcccactgggtgtg

SEQ ID NO: 176297 - DNA, 17 bp, Arabidopsis thaliana
cggtccccacagacggc

SEQ ID NO: 176298 - DNA, 17 bp, Arabidopsis thaliana
cggtccgaacgacgctt

SEQ ID NO: 176299 - DNA, 17 bp, Arabidopsis thaliana
cggtccttggatctgcc

SEQ ID NO: 176300 - DNA, 17 bp, Arabidopsis thaliana
cggtcgctgcaaaacct

SEQ ID NO: 176301 - DNA, 17 bp, Arabidopsis thaliana
cggtcggcgatacgctc

SEQ ID NO: 176302 - DNA, 17 bp, Arabidopsis thaliana
cggtcggtttagaaatt

SEQ ID NO: 176303 - DNA, 17 bp, Arabidopsis thaliana
cggtcgtactcataacc

SEQ ID NO: 176304 - DNA, 17 bp, Arabidopsis thaliana
cggtctcaggcacagct

SEQ ID NO: 176305 - DNA, 17 bp, Arabidopsis thaliana
cggtcttgtcgtgcgcg

SEQ ID NO: 176306 - DNA, 17 bp, Arabidopsis thaliana
cggtgaagtgttcggat

SEQ ID NO: 176307 - DNA, 17 bp, Arabidopsis thaliana
cggtgaagtttcggatc

SEQ ID NO: 176308 - DNA, 17 bp, Arabidopsis thaliana
cggtgacgatactgtag

SEQ ID NO: 176309 - DNA, 17 bp, Arabidopsis thaliana
cggtgccactcctattt

SEQ ID NO: 176310 - DNA, 17 bp, Arabidopsis thaliana
cggtgccactcttattt

SEQ ID NO: 176311 - DNA, 17 bp, Arabidopsis thaliana
cggtgcccaactgcgtg

SEQ ID NO: 176312 - DNA, 17 bp, Arabidopsis thaliana
cggtgctattgtgcggg

SEQ ID NO: 176313 - DNA, 17 bp, Arabidopsis thaliana
cggtggatcttagaaaa

SEQ ID NO: 176314 - DNA, 17 bp, Arabidopsis thaliana
cggttcaataaagctgt

SEQ ID NO: 176315 - DNA, 17 bp, Arabidopsis thaliana
cggttgcacaagccgat

SEQ ID NO: 176316 - DNA, 17 bp, Arabidopsis thaliana
cggttgcggcagcggct

SEQ ID NO: 176317 - DNA, 17 bp, Arabidopsis thaliana
cggttggcctaaatccg

SEQ ID NO: 176318 - DNA, 17 bp, Arabidopsis thaliana
cggttggttttatggcg

SEQ ID NO: 176319 - DNA, 17 bp, Arabidopsis thaliana
cggtttagaaattttgt

SEQ ID NO: 176320 - DNA, 17 bp, Arabidopsis thaliana
cggtttggttcaaggcc

SEQ ID NO: 176321 - DNA, 17 bp, Arabidopsis thaliana
cgtaaaaaaagttgtaa

SEQ ID NO: 176322 - DNA, 17 bp, Arabidopsis thaliana
cgtaaaactacgattta

SEQ ID NO: 176323 - DNA, 17 bp, Arabidopsis thaliana
cgtaaaactacgatttc

SEQ ID NO: 176324 - DNA, 17 bp, Arabidopsis thaliana
cgtaacctgcatgggcc

SEQ ID NO: 176325 - DNA, 17 bp, Arabidopsis thaliana
cgtaacttcgggaaaaa

SEQ ID NO: 176326 - DNA, 17 bp, Arabidopsis thaliana
cgtaagatccgttccca

SEQ ID NO: 176327 - DNA, 17 bp, Arabidopsis thaliana
cgtaagtctgcctagga

SEQ ID NO: 176328 - DNA, 17 bp, Arabidopsis thaliana
cgtaattacaaaggcaa

SEQ ID NO: 176329 - DNA, 17 bp, Arabidopsis thaliana
cgtacaaggagtcaagc

SEQ ID NO: 176330 - DNA, 17 bp, Arabidopsis thaliana
cgtacagagtagtcaag

SEQ ID NO: 176331 - DNA, 17 bp, Arabidopsis thaliana
cgtacatcttgacagca

SEQ ID NO: 176332 - DNA, 17 bp, Arabidopsis thaliana
cgtacccctcggaccgc

SEQ ID NO: 176333 - DNA, 17 bp, Arabidopsis thaliana
cgtacccgggctcagac

SEQ ID NO: 176334 - DNA, 17 bp, Arabidopsis thaliana
cgtacgcctaccgtttg

SEQ ID NO: 176335 - DNA, 17 bp, Arabidopsis thaliana
cgtacggccgatggcat

SEQ ID NO: 176336 - DNA, 17 bp, Arabidopsis thaliana
cgtactaagtagagtca

SEQ ID NO: 176337 - DNA, 17 bp, Arabidopsis thaliana
cgtactaagtagagtct

SEQ ID NO: 176338 - DNA, 17 bp, Arabidopsis thaliana
cgtactagaagccctga

SEQ ID NO: 176339 - DNA, 17 bp, Arabidopsis thaliana
cgtagacagcgcctcgt

SEQ ID NO: 176340 - DNA, 17 bp, Arabidopsis thaliana
cgtagccgagaagatta

SEQ ID NO: 176341 - DNA, 17 bp, Arabidopsis thaliana
cgtaggggaacctgtgg

SEQ ID NO: 176342 - DNA, 17 bp, Arabidopsis thaliana
cgtagtaagcgacgaaa

SEQ ID NO: 176343 - DNA, 17 bp, Arabidopsis thaliana
cgtagtagcggcgagcg

SEQ ID NO: 176344 - DNA, 17 bp, Arabidopsis thaliana
cgtagtcgcatcctgta

SEQ ID NO: 176345 - DNA, 17 bp, Arabidopsis thaliana
cgtatcctgtagatgga

SEQ ID NO: 176346 - DNA, 17 bp, Arabidopsis thaliana
cgtatcgccgaccgaag

SEQ ID NO: 176347 - DNA, 17 bp, Arabidopsis thaliana
cgtatcttgatgatgct

SEQ ID NO: 176348 - DNA, 17 bp, Arabidopsis thaliana
cgtatcttggccttgtc

SEQ ID NO: 176349 - DNA, 17 bp, Arabidopsis thaliana
cgtatgaggagccatgc

SEQ ID NO: 176350 - DNA, 17 bp, Arabidopsis thaliana
cgtcaagcttggatcac

SEQ ID NO: 176351 - DNA, 17 bp, Arabidopsis thaliana
cgtcaatggacaattaa

SEQ ID NO: 176352 - DNA, 17 bp, Arabidopsis thaliana
cgtcacacggaatcgag

SEQ ID NO: 176353 - DNA, 17 bp, Arabidopsis thaliana
cgtcacactatgggagc

SEQ ID NO: 176354 - DNA, 17 bp, Arabidopsis thaliana
cgtcaccaactatcgaa

SEQ ID NO: 176355 - DNA, 17 bp, Arabidopsis thaliana
cgtcactgccccgatcg

SEQ ID NO: 176356 - DNA, 17 bp, Arabidopsis thaliana
cgtcagacggcaggaac

SEQ ID NO: 176357 - DNA, 17 bp, Arabidopsis thaliana
cgtcagcagtgatactg

SEQ ID NO: 176358 - DNA, 17 bp, Arabidopsis thaliana
cgtcagtagatcaccgc

SEQ ID NO: 176359 - DNA, 17 bp, Arabidopsis thaliana
cgtcagtatcgctgcgg

SEQ ID NO: 176360 - DNA, 17 bp, Arabidopsis thaliana
cgtcagtcccggcggat

SEQ ID NO: 176361 - DNA, 17 bp, Arabidopsis thaliana
cgtcagtctcggggtgg

SEQ ID NO: 176362 - DNA, 17 bp, Arabidopsis thaliana
cgtcatcagctcgcgtt

SEQ ID NO: 176363 - DNA, 17 bp, Arabidopsis thaliana
cgtcatgccgggttaaa

SEQ ID NO: 176364 - DNA, 17 bp, Arabidopsis thaliana
cgtcattggaggtaggt

SEQ ID NO: 176365 - DNA, 17 bp, Arabidopsis thaliana
cgtccaaggctaaatac

SEQ ID NO: 176366 - DNA, 17 bp, Arabidopsis thaliana
cgtccaccattcttgtc

SEQ ID NO: 176367 - DNA, 17 bp, Arabidopsis thaliana
cgtccactgctgagagc

SEQ ID NO: 176368 - DNA, 17 bp, Arabidopsis thaliana
cgtccactgctgagatc

SEQ ID NO: 176369 - DNA, 17 bp, Arabidopsis thaliana
cgtcccgcatcagcaaa

SEQ ID NO: 176370 - DNA, 17 bp, Arabidopsis thaliana
cgtcccgcatccgacca

SEQ ID NO: 176371 - DNA, 17 bp, Arabidopsis thaliana
cgtcccgcgaaggccac

SEQ ID NO: 176372 - DNA, 17 bp, Arabidopsis thaliana
cgtccctccgtgaaatg

SEQ ID NO: 176373 - DNA, 17 bp, Arabidopsis thaliana
cgtccctgccctttgta

SEQ ID NO: 176374 - DNA, 17 bp, Arabidopsis thaliana
cgtcctatctcagtagt

SEQ ID NO: 176375 - DNA, 17 bp, Arabidopsis thaliana
cgtcctcagcgacggac

SEQ ID NO: 176376 - DNA, 17 bp, Arabidopsis thaliana
cgtcctccgcaaaaacg

SEQ ID NO: 176377 - DNA, 17 bp, Arabidopsis thaliana
cgtcctggtcggatgcg

SEQ ID NO: 176378 - DNA, 17 bp, Arabidopsis thaliana
cgtccttcgcgggcgga

SEQ ID NO: 176379 - DNA, 17 bp, Arabidopsis thaliana
cgtcctttccgtcaact

SEQ ID NO: 176380 - DNA, 17 bp, Arabidopsis thaliana
cgtcgaaaatgagtatc

SEQ ID NO: 176381 - DNA, 17 bp, Arabidopsis thaliana
cgtcgaacagtcagctc

SEQ ID NO: 176382 - DNA, 17 bp, Arabidopsis thaliana
cgtcgagtcgttgaccg

SEQ ID NO: 176383 - DNA, 17 bp, Arabidopsis thaliana
cgtcgccagcacagaaa

SEQ ID NO: 176384 - DNA, 17 bp, Arabidopsis thaliana
cgtcgccagcacagaca

SEQ ID NO: 176385 - DNA, 17 bp, Arabidopsis thaliana
cgtcgccagcacagagg

SEQ ID NO: 176386 - DNA, 17 bp, Arabidopsis thaliana
cgtcgccgggacccgag

SEQ ID NO: 176387 - DNA, 17 bp, Arabidopsis thaliana
cgtcgcgagaagtccac

SEQ ID NO: 176388 - DNA, 17 bp, Arabidopsis thaliana
cgtcgcgggcggcgaac

SEQ ID NO: 176389 - DNA, 17 bp, Arabidopsis thaliana
cgtcgctcctaccgatt

SEQ ID NO: 176390 - DNA, 17 bp, Arabidopsis thaliana
cgtcggaccaggcttca

SEQ ID NO: 176391 - DNA, 17 bp, Arabidopsis thaliana
cgtcggagacgacggag

SEQ ID NO: 176392 - DNA, 17 bp, Arabidopsis thaliana
cgtcggcgggcctcggg

SEQ ID NO: 176393 - DNA, 17 bp, Arabidopsis thaliana
cgtcggcgggggcctcg

SEQ ID NO: 176394 - DNA, 17 bp, Arabidopsis thaliana
cgtcggggcaagagcca

SEQ ID NO: 176395 - DNA, 17 bp, Arabidopsis thaliana
cgtcggtgcagatcttg

SEQ ID NO: 176396 - DNA, 17 bp, Arabidopsis thaliana
cgtcgtattccagatta

SEQ ID NO: 176397 - DNA, 17 bp, Arabidopsis thaliana
cgtcgtctaagaaaaga

SEQ ID NO: 176398 - DNA, 17 bp, Arabidopsis thaliana
cgtcgtgagacaggtta

SEQ ID NO: 176399 - DNA, 17 bp, Arabidopsis thaliana
cgtcgttcggaccgccc

SEQ ID NO: 176400 - DNA, 17 bp, Arabidopsis thaliana
cgtcgttcggaccgcct

SEQ ID NO: 176401 - DNA, 17 bp, Arabidopsis thaliana
cgtcgttggctgtctct

SEQ ID NO: 176402 - DNA, 17 bp, Arabidopsis thaliana
cgtctacaggatgcgac

SEQ ID NO: 176403 - DNA, 17 bp, Arabidopsis thaliana
cgtctagacaaggccaa

SEQ ID NO: 176404 - DNA, 17 bp, Arabidopsis thaliana
cgtctagagatctccag

SEQ ID NO: 176405 - DNA, 17 bp, Arabidopsis thaliana
cgtctccaaggtgaaca

SEQ ID NO: 176406 - DNA, 17 bp, Arabidopsis thaliana
cgtctcccgaggttaaa

SEQ ID NO: 176407 - DNA, 17 bp, Arabidopsis thaliana
cgtctcccggtaggacc

SEQ ID NO: 176408 - DNA, 17 bp, Arabidopsis thaliana
cgtctccggcaccaccg

SEQ ID NO: 176409 - DNA, 17 bp, Arabidopsis thaliana
cgtctcggttcgcgatc

SEQ ID NO: 176410 - DNA, 17 bp, Arabidopsis thaliana
cgtctgacggcagttga

SEQ ID NO: 176411 - DNA, 17 bp, Arabidopsis thaliana
cgtctgacttgggtata

SEQ ID NO: 176412 - DNA, 17 bp, Arabidopsis thaliana
cgtctgccgggagccga

SEQ ID NO: 176413 - DNA, 17 bp, Arabidopsis thaliana
cgtctgcctgggtgtca

SEQ ID NO: 176414 - DNA, 17 bp, Arabidopsis thaliana
cgtctgtaggaggcttt

SEQ ID NO: 176415 - DNA, 17 bp, Arabidopsis thaliana
cgtctgtaggtggcttt

SEQ ID NO: 176416 - DNA, 17 bp, Arabidopsis thaliana
cgtctgtgatccatgga

SEQ ID NO: 176417 - DNA, 17 bp, Arabidopsis thaliana
cgtcttagtcgcatcct

SEQ ID NO: 176418 - DNA, 17 bp, Arabidopsis thaliana
cgtcttcaagcttctca

SEQ ID NO: 176419 - DNA, 17 bp, Arabidopsis thaliana
cgtcttccgcaaagatc

SEQ ID NO: 176420 - DNA, 17 bp, Arabidopsis thaliana
cgtcttgtaacacgcac

SEQ ID NO: 176421 - DNA, 17 bp, Arabidopsis thaliana
cgtcttgtaacacggac

SEQ ID NO: 176422 - DNA, 17 bp, Arabidopsis thaliana
cgtcttgttccattgca

SEQ ID NO: 176423 - DNA, 17 bp, Arabidopsis thaliana
cgtctttccactaagca

SEQ ID NO: 176424 - DNA, 17 bp, Arabidopsis thaliana
cgtctttccactaagct

SEQ ID NO: 176425 - DNA, 17 bp, Arabidopsis thaliana
cgtgaactgtagatgga

SEQ ID NO: 176426 - DNA, 17 bp, Arabidopsis thaliana
cgtgaagctgagactga

SEQ ID NO: 176427 - DNA, 17 bp, Arabidopsis thaliana
cgtgaagctgagactgc

SEQ ID NO: 176428 - DNA, 17 bp, Arabidopsis thaliana
cgtgaagggatgcctcc

SEQ ID NO: 176429 - DNA, 17 bp, Arabidopsis thaliana
cgtgaatcggaggcggg

SEQ ID NO: 176430 - DNA, 17 bp, Arabidopsis thaliana
cgtgaatgatgcactca

SEQ ID NO: 176431 - DNA, 17 bp, Arabidopsis thaliana
cgtgaattaactgagaa

SEQ ID NO: 176432 - DNA, 17 bp, Arabidopsis thaliana
cgtgacgtgttcgatgc

SEQ ID NO: 176433 - DNA, 17 bp, Arabidopsis thaliana
cgtgagacaggttagta

SEQ ID NO: 176434 - DNA, 17 bp, Arabidopsis thaliana
cgtgagacaggttagtt

SEQ ID NO: 176435 - DNA, 17 bp, Arabidopsis thaliana
cgtgagcggcactcggt

SEQ ID NO: 176436 - DNA, 17 bp, Arabidopsis thaliana
cgtgagctgggtttaga

SEQ ID NO: 176437 - DNA, 17 bp, Arabidopsis thaliana
cgtgatagaaacaatga

SEQ ID NO: 176438 - DNA, 17 bp, Arabidopsis thaliana
cgtgatatactcaggca

SEQ ID NO: 176439 - DNA, 17 bp, Arabidopsis thaliana
cgtgatatactcaggcg

SEQ ID NO: 176440 - DNA, 17 bp, Arabidopsis thaliana
cgtgatcgtggtctgca

SEQ ID NO: 176441 - DNA, 17 bp, Arabidopsis thaliana
cgtgatcgtggtctgtc

SEQ ID NO: 176442 - DNA, 17 bp, Arabidopsis thaliana
cgtgatggggatagata

SEQ ID NO: 176443 - DNA, 17 bp, Arabidopsis thaliana
cgtgatggggatagatc

SEQ ID NO: 176444 - DNA, 17 bp, Arabidopsis thaliana
cgtgatggtctatgatt

SEQ ID NO: 176445 - DNA, 17 bp, Arabidopsis thaliana
cgtgcagtgctgtagct

SEQ ID NO: 176446 - DNA, 17 bp, Arabidopsis thaliana
cgtgccagcagccgcgg

SEQ ID NO: 176447 - DNA, 17 bp, Arabidopsis thaliana
cgtgccccgccggaagc

SEQ ID NO: 176448 - DNA, 17 bp, Arabidopsis thaliana
cgtgcccctggcgctgt

SEQ ID NO: 176449 - DNA, 17 bp, Arabidopsis thaliana
cgtgccggccgggggac

SEQ ID NO: 176450 - DNA, 17 bp, Arabidopsis thaliana
cgtgcgacctataccca

SEQ ID NO: 176451 - DNA, 17 bp, Arabidopsis thaliana
cgtgcgacctatacccg

SEQ ID NO: 176452 - DNA, 17 bp, Arabidopsis thaliana
cgtgcgattcgagaagt

SEQ ID NO: 176453 - DNA, 17 bp, Arabidopsis thaliana
cgtgcgctggattatga

SEQ ID NO: 176454 - DNA, 17 bp, Arabidopsis thaliana
cgtgcggcccagaacat

SEQ ID NO: 176455 - DNA, 17 bp, Arabidopsis thaliana
cgtgcggtgctcttcca

SEQ ID NO: 176456 - DNA, 17 bp, Arabidopsis thaliana
cgtgctaaagagcgtgg

SEQ ID NO: 176457 - DNA, 17 bp, Arabidopsis thaliana
cgtgctacaagagccag

SEQ ID NO: 176458 - DNA, 17 bp, Arabidopsis thaliana
cgtggcccgaagacgac

SEQ ID NO: 176459 - DNA, 17 bp, Arabidopsis thaliana
cgtggcggttgacggca

SEQ ID NO: 176460 - DNA, 17 bp, Arabidopsis thaliana
cgtggggacccgggctc

SEQ ID NO: 176461 - DNA, 17 bp, Arabidopsis thaliana
cgtgggtgtcaggtaac

SEQ ID NO: 176462 - DNA, 17 bp, Arabidopsis thaliana
cgtgggttagccgatcc

SEQ ID NO: 176463 - DNA, 17 bp, Arabidopsis thaliana
cgtggtgcgacagggtc

SEQ ID NO: 176464 - DNA, 17 bp, Arabidopsis thaliana
cgtggtgtccggtgcgc

SEQ ID NO: 176465 - DNA, 17 bp, Arabidopsis thaliana
cgtggtgtgaactcgat

SEQ ID NO: 176466 - DNA, 17 bp, Arabidopsis thaliana
cgtggtttcgcgtatcg

SEQ ID NO: 176467 - DNA, 17 bp, Arabidopsis thaliana
cgtggttttgcgtatcg

SEQ ID NO: 176468 - DNA, 17 bp, Arabidopsis thaliana
cgtgtaaccaaaacata

SEQ ID NO: 176469 - DNA, 17 bp, Arabidopsis thaliana
cgtgtcccaccaggtgt

SEQ ID NO: 176470 - DNA, 17 bp, Arabidopsis thaliana
cgtgtcccaccgggtgt

SEQ ID NO: 176471 - DNA, 17 bp, Arabidopsis thaliana
cgtgtcccaccgtggtc

SEQ ID NO: 176472 - DNA, 17 bp, Arabidopsis thaliana
cgtgtcccactgggtgt

SEQ ID NO: 176473 - DNA, 17 bp, Arabidopsis thaliana
cgtgtcccggcgacgga

SEQ ID NO: 176474 - DNA, 17 bp, Arabidopsis thaliana
cgtgtcggctgctttgt

SEQ ID NO: 176475 - DNA, 17 bp, Arabidopsis thaliana
cgtgtcggggaaccagg

SEQ ID NO: 176476 - DNA, 17 bp, Arabidopsis thaliana
cgtgtcgttggctaagt

SEQ ID NO: 176477 - DNA, 17 bp, Arabidopsis thaliana
cgtgtcgttggctagct

SEQ ID NO: 176478 - DNA, 17 bp, Arabidopsis thaliana
cgtgtgggtggcaaaca

SEQ ID NO: 176479 - DNA, 17 bp, Arabidopsis thaliana
cgtgtgtgttaagcgaa

SEQ ID NO: 176480 - DNA, 17 bp, Arabidopsis thaliana
cgtgttccaaaagtcat

SEQ ID NO: 176481 - DNA, 17 bp, Arabidopsis thaliana
cgtgttcgattcacggc

SEQ ID NO: 176482 - DNA, 17 bp, Arabidopsis thaliana
cgtgttctcaggtcacc

SEQ ID NO: 176483 - DNA, 17 bp, Arabidopsis thaliana
cgtgttggcccaaatct

SEQ ID NO: 176484 - DNA, 17 bp, Arabidopsis thaliana
cgtgttttgtccttatc

SEQ ID NO: 176485 - DNA, 17 bp, Arabidopsis thaliana
cgttacacagctagccc

SEQ ID NO: 176486 - DNA, 17 bp, Arabidopsis thaliana
cgttaccaccatggtag

SEQ ID NO: 176487 - DNA, 17 bp, Arabidopsis thaliana
cgttaccccgcatctcc

SEQ ID NO: 176488 - DNA, 17 bp, Arabidopsis thaliana
cgttaccgccggcaagt

SEQ ID NO: 176489 - DNA, 17 bp, Arabidopsis thaliana
cgttacgatctgctgag

SEQ ID NO: 176490 - DNA, 17 bp, Arabidopsis thaliana
cgttacgggatactttg

SEQ ID NO: 176491 - DNA, 17 bp, Arabidopsis thaliana
cgttactcgaaccctgg

SEQ ID NO: 176492 - DNA, 17 bp, Arabidopsis thaliana
cgttagcatccgcaggg

SEQ ID NO: 176493 - DNA, 17 bp, Arabidopsis thaliana
cgttagtagcggcgagc

SEQ ID NO: 176494 - DNA, 17 bp, Arabidopsis thaliana
cgttatccatcctgagt

SEQ ID NO: 176495 - DNA, 17 bp, Arabidopsis thaliana
cgttatcgtccagcggt

SEQ ID NO: 176496 - DNA, 17 bp, Arabidopsis thaliana
cgttcaaatcgggtcgg

SEQ ID NO: 176497 - DNA, 17 bp, Arabidopsis thaliana
cgttccaattttatcgg

SEQ ID NO: 176498 - DNA, 17 bp, Arabidopsis thaliana
cgttccacgctcaccgc

SEQ ID NO: 176499 - DNA, 17 bp, Arabidopsis thaliana
cgttccactgagattca

SEQ ID NO: 176500 - DNA, 17 bp, Arabidopsis thaliana
cgttccccacagacggc

SEQ ID NO: 176501 - DNA, 17 bp, Arabidopsis thaliana
cgttcccggcgagacgt

SEQ ID NO: 176502 - DNA, 17 bp, Arabidopsis thaliana
cgttccggcaggtcgga

SEQ ID NO: 176503 - DNA, 17 bp, Arabidopsis thaliana
cgttcttcgtgctggtc

SEQ ID NO: 176504 - DNA, 17 bp, Arabidopsis thaliana
cgttcttgaaccttgca

SEQ ID NO: 176505 - DNA, 17 bp, Arabidopsis thaliana
cgttcttgaaccttgcg

SEQ ID NO: 176506 - DNA, 17 bp, Arabidopsis thaliana
cgttgaccgatgcggcg

SEQ ID NO: 176507 - DNA, 17 bp, Arabidopsis thaliana
cgttgacgacaacggca

SEQ ID NO: 176508 - DNA, 17 bp, Arabidopsis thaliana
cgttgactacgtccctg

SEQ ID NO: 176509 - DNA, 17 bp, Arabidopsis thaliana
cgttgagttatagcgtc

SEQ ID NO: 176510 - DNA, 17 bp, Arabidopsis thaliana
cgttgatacggcggcgt

SEQ ID NO: 176511 - DNA, 17 bp, Arabidopsis thaliana
cgttgatggacccaatg

SEQ ID NO: 176512 - DNA, 17 bp, Arabidopsis thaliana
cgttgcactactgcacg

SEQ ID NO: 176513 - DNA, 17 bp, Arabidopsis thaliana
cgttgccgagagtcgtc

SEQ ID NO: 176514 - DNA, 17 bp, Arabidopsis thaliana
cgttgctctgatgattc

SEQ ID NO: 176515 - DNA, 17 bp, Arabidopsis thaliana
cgttgctttttgatcct

SEQ ID NO: 176516 - DNA, 17 bp, Arabidopsis thaliana
cgttggacgtgggttag

SEQ ID NO: 176517 - DNA, 17 bp, Arabidopsis thaliana
cgttggcctcacatcaa

SEQ ID NO: 176518 - DNA, 17 bp, Arabidopsis thaliana
cgttggctaagtccgtc

SEQ ID NO: 176519 - DNA, 17 bp, Arabidopsis thaliana
cgttggctaagtccgtt

SEQ ID NO: 176520 - DNA, 17 bp, Arabidopsis thaliana
cgttggctaattccgtt

SEQ ID NO: 176521 - DNA, 17 bp, Arabidopsis thaliana
cgttggggaagaatcgc

SEQ ID NO: 176522 - DNA, 17 bp, Arabidopsis thaliana
cgttggtggagtgattt

SEQ ID NO: 176523 - DNA, 17 bp, Arabidopsis thaliana
cgttgtcgtccagcggt

SEQ ID NO: 176524 - DNA, 17 bp, Arabidopsis thaliana
cgttgtctgttcgacct

SEQ ID NO: 176525 - DNA, 17 bp, Arabidopsis thaliana
cgttgtttaccgtaatg

SEQ ID NO: 176526 - DNA, 17 bp, Arabidopsis thaliana
cgtttactatgctgcca

SEQ ID NO: 176527 - DNA, 17 bp, Arabidopsis thaliana
cgtttatatccgagttc

SEQ ID NO: 176528 - DNA, 17 bp, Arabidopsis thaliana
cgtttcacgtcgggttc

SEQ ID NO: 176529 - DNA, 17 bp, Arabidopsis thaliana
cgtttccagggtgggca

SEQ ID NO: 176530 - DNA, 17 bp, Arabidopsis thaliana
cgtttcccgactggtgc

SEQ ID NO: 176531 - DNA, 17 bp, Arabidopsis thaliana
cgtttcccggctggtgc

SEQ ID NO: 176532 - DNA, 17 bp, Arabidopsis thaliana
cgtttccggcaggtcgg

SEQ ID NO: 176533 - DNA, 17 bp, Arabidopsis thaliana
cgtttccgggaggtcgg

SEQ ID NO: 176534 - DNA, 17 bp, Arabidopsis thaliana
cgtttcggcggtcctgc

SEQ ID NO: 176535 - DNA, 17 bp, Arabidopsis thaliana
cgtttgacctggggtcg

SEQ ID NO: 176536 - DNA, 17 bp, Arabidopsis thaliana
cgtttgctcttggcatt

SEQ ID NO: 176537 - DNA, 17 bp, Arabidopsis thaliana
cgtttggctactaatgg

SEQ ID NO: 176538 - DNA, 17 bp, Arabidopsis thaliana
cgtttgtgttgcagatt

SEQ ID NO: 176539 - DNA, 17 bp, Arabidopsis thaliana
cgttttggcggattatg

SEQ ID NO: 176540 - DNA, 17 bp, Arabidopsis thaliana
cgtttttgtactgggct

SEQ ID NO: 176541 - DNA, 17 bp, Arabidopsis thaliana
ctaaaaaaaaattcgaa

SEQ ID NO: 176542 - DNA, 17 bp, Arabidopsis thaliana
ctaaaaaagattgagcc

SEQ ID NO: 176543 - DNA, 17 bp, Arabidopsis thaliana
ctaaaacgactctcggc

SEQ ID NO: 176544 - DNA, 17 bp, Arabidopsis thaliana
ctaaaagcccccaatat

SEQ ID NO: 176545 - DNA, 17 bp, Arabidopsis thaliana
ctaaaagcccctatatt

SEQ ID NO: 176546 - DNA, 17 bp, Arabidopsis thaliana
ctaaacccatacaacca

SEQ ID NO: 176547 - DNA, 17 bp, Arabidopsis thaliana
ctaaaccgaccgagcca

SEQ ID NO: 176548 - DNA, 17 bp, Arabidopsis thaliana
ctaaagtcgaccggtcg

SEQ ID NO: 176549 - DNA, 17 bp, Arabidopsis thaliana
ctaaatccgagccaagg

SEQ ID NO: 176550 - DNA, 17 bp, Arabidopsis thaliana
ctaaatccgagccagcc

SEQ ID NO: 176551 - DNA, 17 bp, Arabidopsis thaliana
ctaacaaggaaacacta

SEQ ID NO: 176552 - DNA, 17 bp, Arabidopsis thaliana
ctaacagaccggtagac

SEQ ID NO: 176553 - DNA, 17 bp, Arabidopsis thaliana
ctaaccgaggcgcgtct

SEQ ID NO: 176554 - DNA, 17 bp, Arabidopsis thaliana
ctaacgcaatgtgattt

SEQ ID NO: 176555 - DNA, 17 bp, Arabidopsis thaliana
ctaactactgcgaaagc

SEQ ID NO: 176556 - DNA, 17 bp, Arabidopsis thaliana
ctaactagatgaatgtg

SEQ ID NO: 176557 - DNA, 17 bp, Arabidopsis thaliana
ctaactagctacgtgga

SEQ ID NO: 176558 - DNA, 17 bp, Arabidopsis thaliana
ctaactgtcctaaggta

SEQ ID NO: 176559 - DNA, 17 bp, Arabidopsis thaliana
ctaagaacggccatgca

SEQ ID NO: 176560 - DNA, 17 bp, Arabidopsis thaliana
ctaagatcaagcgtttg

SEQ ID NO: 176561 - DNA, 17 bp, Arabidopsis thaliana
ctaagattctgctcgtg

SEQ ID NO: 176562 - DNA, 17 bp, Arabidopsis thaliana
ctaagctcctactgagg

SEQ ID NO: 176563 - DNA, 17 bp, Arabidopsis thaliana
ctaagtcagaattcgag

SEQ ID NO: 176564 - DNA, 17 bp, Arabidopsis thaliana
ctaagtcagaattcggg

SEQ ID NO: 176565 - DNA, 17 bp, Arabidopsis thaliana
ctaagtcaggatccggg

SEQ ID NO: 176566 - DNA, 17 bp, Arabidopsis thaliana
ctaagtccaacatagcg

SEQ ID NO: 176567 - DNA, 17 bp, Arabidopsis thaliana
ctaagtccgttcggcgg

SEQ ID NO: 176568 - DNA, 17 bp, Arabidopsis thaliana
ctaataaagactgtatc

SEQ ID NO: 176569 - DNA, 17 bp, Arabidopsis thaliana
ctaatagaaactgaatg

SEQ ID NO: 176570 - DNA, 17 bp, Arabidopsis thaliana
ctacactgacacagcca

SEQ ID NO: 176571 - DNA, 17 bp, Arabidopsis thaliana
ctacactgtctgaggtg

SEQ ID NO: 176572 - DNA, 17 bp, Arabidopsis thaliana
ctacatagctggtggga

SEQ ID NO: 176573 - DNA, 17 bp, Arabidopsis thaliana
ctacatctggaaaaaaa

SEQ ID NO: 176574 - DNA, 17 bp, Arabidopsis thaliana
ctacatctggaaaacaa

SEQ ID NO: 176575 - DNA, 17 bp, Arabidopsis thaliana
ctacatctggaaaacat

SEQ ID NO: 176576 - DNA, 17 bp, Arabidopsis thaliana
ctaccacatcgagcccg

SEQ ID NO: 176577 - DNA, 17 bp, Arabidopsis thaliana
ctaccatccgaccaaca

SEQ ID NO: 176578 - DNA, 17 bp, Arabidopsis thaliana
ctaccatccgatcaaca

SEQ ID NO: 176579 - DNA, 17 bp, Arabidopsis thaliana
ctaccattcgatcaaca

SEQ ID NO: 176580 - DNA, 17 bp, Arabidopsis thaliana
ctaccgattgaatgaat

SEQ ID NO: 176581 - DNA, 17 bp, Arabidopsis thaliana
ctaccgattgaatgatc

SEQ ID NO: 176582 - DNA, 17 bp, Arabidopsis thaliana
ctaccgcaagagttgca

SEQ ID NO: 176583 - DNA, 17 bp, Arabidopsis thaliana
ctaccgcgacgagttcg

SEQ ID NO: 176584 - DNA, 17 bp, Arabidopsis thaliana
ctaccgtgcgctggatt

SEQ ID NO: 176585 - DNA, 17 bp, Arabidopsis thaliana
ctacctccaatgacggc

SEQ ID NO: 176586 - DNA, 17 bp, Arabidopsis thaliana
ctacctccccgtgtcag

SEQ ID NO: 176587 - DNA, 17 bp, Arabidopsis thaliana
ctacgaacactagctat

SEQ ID NO: 176588 - DNA, 17 bp, Arabidopsis thaliana
ctacgaacactggctat

SEQ ID NO: 176589 - DNA, 17 bp, Arabidopsis thaliana
ctacgagccgggttgtt

SEQ ID NO: 176590 - DNA, 17 bp, Arabidopsis thaliana
ctacgctatgttggact

SEQ ID NO: 176591 - DNA, 17 bp, Arabidopsis thaliana
ctacggatcgtattcaa

SEQ ID NO: 176592 - DNA, 17 bp, Arabidopsis thaliana
ctacggatcgtatttat

SEQ ID NO: 176593 - DNA, 17 bp, Arabidopsis thaliana
ctacgtggtgtaggtac

SEQ ID NO: 176594 - DNA, 17 bp, Arabidopsis thaliana
ctactactcggataacc

SEQ ID NO: 176595 - DNA, 17 bp, Arabidopsis thaliana
ctactatacaagcttgg

SEQ ID NO: 176596 - DNA, 17 bp, Arabidopsis thaliana
ctactatccagcgaaac

SEQ ID NO: 176597 - DNA, 17 bp, Arabidopsis thaliana
ctactatcctgggccta

SEQ ID NO: 176598 - DNA, 17 bp, Arabidopsis thaliana
ctactattgtttcgtga

SEQ ID NO: 176599 - DNA, 17 bp, Arabidopsis thaliana
ctactcagtgatatgaa

SEQ ID NO: 176600 - DNA, 17 bp, Arabidopsis thaliana
ctactcagtgatatgat

SEQ ID NO: 176601 - DNA, 17 bp, Arabidopsis thaliana
ctactcatcgaggcctg

SEQ ID NO: 176602 - DNA, 17 bp, Arabidopsis thaliana
ctactcattattggaat

SEQ ID NO: 176603 - DNA, 17 bp, Arabidopsis thaliana
ctactccgatattccag

SEQ ID NO: 176604 - DNA, 17 bp, Arabidopsis thaliana
ctactgaggctgaccgg

SEQ ID NO: 176605 - DNA, 17 bp, Arabidopsis thaliana
ctactgagggtcggcaa

SEQ ID NO: 176606 - DNA, 17 bp, Arabidopsis thaliana
ctactgagtaatatgct

SEQ ID NO: 176607 - DNA, 17 bp, Arabidopsis thaliana
ctactgatgcccgcgtc

SEQ ID NO: 176608 - DNA, 17 bp, Arabidopsis thaliana
ctactgcaagggctggc

SEQ ID NO: 176609 - DNA, 17 bp, Arabidopsis thaliana
ctactgcacgggccggc

SEQ ID NO: 176610 - DNA, 17 bp, Arabidopsis thaliana
ctactgcgaaagcattt

SEQ ID NO: 176611 - DNA, 17 bp, Arabidopsis thaliana
ctactgttgtgagtacg

SEQ ID NO: 176612 - DNA, 17 bp, Arabidopsis thaliana
ctacttcattggaaaca

SEQ ID NO: 176613 - DNA, 17 bp, Arabidopsis thaliana
ctactttgtgtgtgtct

SEQ ID NO: 176614 - DNA, 17 bp, Arabidopsis thaliana
ctagaaaactcatctat

SEQ ID NO: 176615 - DNA, 17 bp, Arabidopsis thaliana
ctagaactgcctgagga

SEQ ID NO: 176616 - DNA, 17 bp, Arabidopsis thaliana
ctagaagcgacgcatgc

SEQ ID NO: 176617 - DNA, 17 bp, Arabidopsis thaliana
ctagaatgtgatgcaaa

SEQ ID NO: 176618 - DNA, 17 bp, Arabidopsis thaliana
ctagaattcaatcatga

SEQ ID NO: 176619 - DNA, 17 bp, Arabidopsis thaliana
ctagagagtgtgataat

SEQ ID NO: 176620 - DNA, 17 bp, Arabidopsis thaliana
ctagagctcccttcaat

SEQ ID NO: 176621 - DNA, 17 bp, Arabidopsis thaliana
ctagaggtgtcagaaaa

SEQ ID NO: 176622 - DNA, 17 bp, Arabidopsis thaliana
ctagatatgacctcaaa

SEQ ID NO: 176623 - DNA, 17 bp, Arabidopsis thaliana
ctagatgaatgtggtag

SEQ ID NO: 176624 - DNA, 17 bp, Arabidopsis thaliana
ctagatgaggcccagca

SEQ ID NO: 176625 - DNA, 17 bp, Arabidopsis thaliana
ctagatgtgggacatat

SEQ ID NO: 176626 - DNA, 17 bp, Arabidopsis thaliana
ctagcaactgggagaag

SEQ ID NO: 176627 - DNA, 17 bp, Arabidopsis thaliana
ctagccattgctctctc

SEQ ID NO: 176628 - DNA, 17 bp, Arabidopsis thaliana
ctagccccgaaaatgga

SEQ ID NO: 176629 - DNA, 17 bp, Arabidopsis thaliana
ctagcctaggccacttg

SEQ ID NO: 176630 - DNA, 17 bp, Arabidopsis thaliana
ctagcggcagcgggtaa

SEQ ID NO: 176631 - DNA, 17 bp, Arabidopsis thaliana
ctagctacgtggaggca

SEQ ID NO: 176632 - DNA, 17 bp, Arabidopsis thaliana
ctagctacgtggaggcg

SEQ ID NO: 176633 - DNA, 17 bp, Arabidopsis thaliana
ctaggacatacgttgca

SEQ ID NO: 176634 - DNA, 17 bp, Arabidopsis thaliana
ctaggagatcgtgttct

SEQ ID NO: 176635 - DNA, 17 bp, Arabidopsis thaliana
ctaggatgggtgacctc

SEQ ID NO: 176636 - DNA, 17 bp, Arabidopsis thaliana
ctaggcctccgttatga

SEQ ID NO: 176637 - DNA, 17 bp, Arabidopsis thaliana
ctaggcggactacttgc

SEQ ID NO: 176638 - DNA, 17 bp, Arabidopsis thaliana
ctagggttggtgttgag

SEQ ID NO: 176639 - DNA, 17 bp, Arabidopsis thaliana
ctaggtcatgctctgac

SEQ ID NO: 176640 - DNA, 17 bp, Arabidopsis thaliana
ctaggttcgtcgcggag

SEQ ID NO: 176641 - DNA, 17 bp, Arabidopsis thaliana
ctaggttttgcagcgac

SEQ ID NO: 176642 - DNA, 17 bp, Arabidopsis thaliana
ctagtaactccgtttgg

SEQ ID NO: 176643 - DNA, 17 bp, Arabidopsis thaliana
ctagtaagcgcgagtca

SEQ ID NO: 176644 - DNA, 17 bp, Arabidopsis thaliana
ctagtacgagaggaacc

SEQ ID NO: 176645 - DNA, 17 bp, Arabidopsis thaliana
ctagtcactttcaatgc

SEQ ID NO: 176646 - DNA, 17 bp, Arabidopsis thaliana
ctagtcgatgtttgacc

SEQ ID NO: 176647 - DNA, 17 bp, Arabidopsis thaliana
ctagtcgcatcctgaga

SEQ ID NO: 176648 - DNA, 17 bp, Arabidopsis thaliana
ctagtcgcatcctgcct

SEQ ID NO: 176649 - DNA, 17 bp, Arabidopsis thaliana
ctagtcgcatcctggat

SEQ ID NO: 176650 - DNA, 17 bp, Arabidopsis thaliana
ctagtcgcatcctgtaa

SEQ ID NO: 176651 - DNA, 17 bp, Arabidopsis thaliana
ctagtcgcatcctgtag

SEQ ID NO: 176652 - DNA, 17 bp, Arabidopsis thaliana
ctagtcgcatcctgtat

SEQ ID NO: 176653 - DNA, 17 bp, Arabidopsis thaliana
ctagtcttaaccatatc

SEQ ID NO: 176654 - DNA, 17 bp, Arabidopsis thaliana
ctagtcttccaggtaca

SEQ ID NO: 176655 - DNA, 17 bp, Arabidopsis thaliana
ctagttagatatgaggt

SEQ ID NO: 176656 - DNA, 17 bp, Arabidopsis thaliana
ctagttagcaggctgag

SEQ ID NO: 176657 - DNA, 17 bp, Arabidopsis thaliana
ctagttagccgccgcaa

SEQ ID NO: 176658 - DNA, 17 bp, Arabidopsis thaliana
ctagttcgtcgatatgt

SEQ ID NO: 176659 - DNA, 17 bp, Arabidopsis thaliana
ctataaaaattcaaata

SEQ ID NO: 176660 - DNA, 17 bp, Arabidopsis thaliana
ctataacattagggctc

SEQ ID NO: 176661 - DNA, 17 bp, Arabidopsis thaliana
ctatactaaggatctcg

SEQ ID NO: 176662 - DNA, 17 bp, Arabidopsis thaliana
ctatagggctactccca

SEQ ID NO: 176663 - DNA, 17 bp, Arabidopsis thaliana
ctatcagagagatcatc

SEQ ID NO: 176664 - DNA, 17 bp, Arabidopsis thaliana
ctatcaggtaaagccaa

SEQ ID NO: 176665 - DNA, 17 bp, Arabidopsis thaliana
ctatcattgatgctctt

SEQ ID NO: 176666 - DNA, 17 bp, Arabidopsis thaliana
ctatcattgtgaagcag

SEQ ID NO: 176667 - DNA, 17 bp, Arabidopsis thaliana
ctatcctgggcctacca

SEQ ID NO: 176668 - DNA, 17 bp, Arabidopsis thaliana
ctatcctgggcctacta

SEQ ID NO: 176669 - DNA, 17 bp, Arabidopsis thaliana
ctatcgcaacaagatgg

SEQ ID NO: 176670 - DNA, 17 bp, Arabidopsis thaliana
ctatcgcgacgcggcat

SEQ ID NO: 176671 - DNA, 17 bp, Arabidopsis thaliana
ctatcgcgacgcgggca

SEQ ID NO: 176672 - DNA, 17 bp, Arabidopsis thaliana
ctatctaacagcggggt

SEQ ID NO: 176673 - DNA, 17 bp, Arabidopsis thaliana
ctatctgaggtgaggat

SEQ ID NO: 176674 - DNA, 17 bp, Arabidopsis thaliana
ctatcttcctctttgtt

SEQ ID NO: 176675 - DNA, 17 bp, Arabidopsis thaliana
ctatctttggcgggggc

SEQ ID NO: 176676 - DNA, 17 bp, Arabidopsis thaliana
ctatgaacgcttggctg

SEQ ID NO: 176677 - DNA, 17 bp, Arabidopsis thaliana
ctatgacctggacggac

SEQ ID NO: 176678 - DNA, 17 bp, Arabidopsis thaliana
ctatgagtttgtaaaga

SEQ ID NO: 176679 - DNA, 17 bp, Arabidopsis thaliana
ctatgatactcattttc

SEQ ID NO: 176680 - DNA, 17 bp, Arabidopsis thaliana
ctatgctcgaatacata

SEQ ID NO: 176681 - DNA, 17 bp, Arabidopsis thaliana
ctatgctcgaatacatg

SEQ ID NO: 176682 - DNA, 17 bp, Arabidopsis thaliana
ctatgggtggtggtgca

SEQ ID NO: 176683 - DNA, 17 bp, Arabidopsis thaliana
ctatgtggcctacctgc

SEQ ID NO: 176684 - DNA, 17 bp, Arabidopsis thaliana
ctatgttggacttagaa

SEQ ID NO: 176685 - DNA, 17 bp, Arabidopsis thaliana
ctatgttggacttagga

SEQ ID NO: 176686 - DNA, 17 bp, Arabidopsis thaliana
ctattagtaggcccagg

SEQ ID NO: 176687 - DNA, 17 bp, Arabidopsis thaliana
ctattagtaggcccata

SEQ ID NO: 176688 - DNA, 17 bp, Arabidopsis thaliana
ctattcacttgattatg

SEQ ID NO: 176689 - DNA, 17 bp, Arabidopsis thaliana
ctattcgaaaatcttca

SEQ ID NO: 176690 - DNA, 17 bp, Arabidopsis thaliana
ctattgattcccaagta

SEQ ID NO: 176691 - DNA, 17 bp, Arabidopsis thaliana
ctattgtgttggccttc

SEQ ID NO: 176692 - DNA, 17 bp, Arabidopsis thaliana
ctattgttggactacca

SEQ ID NO: 176693 - DNA, 17 bp, Arabidopsis thaliana
ctatttcagtagagcgt

SEQ ID NO: 176694 - DNA, 17 bp, Arabidopsis thaliana
ctatttcctctcgctct

SEQ ID NO: 176695 - DNA, 17 bp, Arabidopsis thaliana
ctatttcgatagttggt

SEQ ID NO: 176696 - DNA, 17 bp, Arabidopsis thaliana
ctatttgattcgtacac

SEQ ID NO: 176697 - DNA, 17 bp, Arabidopsis thaliana
ctcaaaatgattgtcag

SEQ ID NO: 176698 - DNA, 17 bp, Arabidopsis thaliana
ctcaaacacaaggtgcc

SEQ ID NO: 176699 - DNA, 17 bp, Arabidopsis thaliana
ctcaaagcaagcctacg

SEQ ID NO: 176700 - DNA, 17 bp, Arabidopsis thaliana
ctcaacacacggtggga

SEQ ID NO: 176701 - DNA, 17 bp, Arabidopsis thaliana
ctcaacagggtcttctt

SEQ ID NO: 176702 - DNA, 17 bp, Arabidopsis thaliana
ctcaaccataaacgatg

SEQ ID NO: 176703 - DNA, 17 bp, Arabidopsis thaliana
ctcaacggaatatcgtt

SEQ ID NO: 176704 - DNA, 17 bp, Arabidopsis thaliana
ctcaacggaatattgtt

SEQ ID NO: 176705 - DNA, 17 bp, Arabidopsis thaliana
ctcaagctaagattctg

SEQ ID NO: 176706 - DNA, 17 bp, Arabidopsis thaliana
ctcaaggagaatctgaa

SEQ ID NO: 176707 - DNA, 17 bp, Arabidopsis thaliana
ctcaagtgattcaccga

SEQ ID NO: 176708 - DNA, 17 bp, Arabidopsis thaliana
ctcacaattggtcatcg

SEQ ID NO: 176709 - DNA, 17 bp, Arabidopsis thaliana
ctcacagcttggactga

SEQ ID NO: 176710 - DNA, 17 bp, Arabidopsis thaliana
ctcacagcttggactgg

SEQ ID NO: 176711 - DNA, 17 bp, Arabidopsis thaliana
ctcacatcaatatgctt

SEQ ID NO: 176712 - DNA, 17 bp, Arabidopsis thaliana
ctcaccaggtccagaca

SEQ ID NO: 176713 - DNA, 17 bp, Arabidopsis thaliana
ctcacccatcgatgtgc

SEQ ID NO: 176714 - DNA, 17 bp, Arabidopsis thaliana
ctcacccatcgttgtgc

SEQ ID NO: 176715 - DNA, 17 bp, Arabidopsis thaliana
ctcacctgtgcaaatat

SEQ ID NO: 176716 - DNA, 17 bp, Arabidopsis thaliana
ctcactggtttgagatc

SEQ ID NO: 176717 - DNA, 17 bp, Arabidopsis thaliana
ctcagattcaccatcca

SEQ ID NO: 176718 - DNA, 17 bp, Arabidopsis thaliana
ctcagcctgctaactag

SEQ ID NO: 176719 - DNA, 17 bp, Arabidopsis thaliana
ctcaggagggatagcgc

SEQ ID NO: 176720 - DNA, 17 bp, Arabidopsis thaliana
ctcaggcatatcctctg

SEQ ID NO: 176721 - DNA, 17 bp, Arabidopsis thaliana
ctcagtcgcatcctgta

SEQ ID NO: 176722 - DNA, 17 bp, Arabidopsis thaliana
ctcagtggatcgtggca

SEQ ID NO: 176723 - DNA, 17 bp, Arabidopsis thaliana
ctcagttggtagagctc

SEQ ID NO: 176724 - DNA, 17 bp, Arabidopsis thaliana
ctcataaggtgccagcg

SEQ ID NO: 176725 - DNA, 17 bp, Arabidopsis thaliana
ctcatagtttgcatctt

SEQ ID NO: 176726 - DNA, 17 bp, Arabidopsis thaliana
ctcatattggcttctac

SEQ ID NO: 176727 - DNA, 17 bp, Arabidopsis thaliana
ctcatattggcttctat

SEQ ID NO: 176728 - DNA, 17 bp, Arabidopsis thaliana
ctcatccatcgatgtgc

SEQ ID NO: 176729 - DNA, 17 bp, Arabidopsis thaliana
ctcatcctgtagatgga

SEQ ID NO: 176730 - DNA, 17 bp, Arabidopsis thaliana
ctcatctacctttggtg

SEQ ID NO: 176731 - DNA, 17 bp, Arabidopsis thaliana
ctcatctgaaccatttt

SEQ ID NO: 176732 - DNA, 17 bp, Arabidopsis thaliana
ctcattagctgcgtcat

SEQ ID NO: 176733 - DNA, 17 bp, Arabidopsis thaliana
ctcattattggaatacc

SEQ ID NO: 176734 - DNA, 17 bp, Arabidopsis thaliana
ctcatttacttgaacac

SEQ ID NO: 176735 - DNA, 17 bp, Arabidopsis thaliana
ctcatttgagggtcgaa

SEQ ID NO: 176736 - DNA, 17 bp, Arabidopsis thaliana
ctcattttcgacggcat

SEQ ID NO: 176737 - DNA, 17 bp, Arabidopsis thaliana
ctcattttctacggcat

SEQ ID NO: 176738 - DNA, 17 bp, Arabidopsis thaliana
ctcattttgttatttgg

SEQ ID NO: 176739 - DNA, 17 bp, Arabidopsis thaliana
ctccaagcgaatgatga

SEQ ID NO: 176740 - DNA, 17 bp, Arabidopsis thaliana
ctccaagctgagagaga

SEQ ID NO: 176741 - DNA, 17 bp, Arabidopsis thaliana
ctccaagctgagagtca

SEQ ID NO: 176742 - DNA, 17 bp, Arabidopsis thaliana
ctccaagctgagagtga

SEQ ID NO: 176743 - DNA, 17 bp, Arabidopsis thaliana
ctccaagggtgcgagca

SEQ ID NO: 176744 - DNA, 17 bp, Arabidopsis thaliana
ctccaagggtgcgagct

SEQ ID NO: 176745 - DNA, 17 bp, Arabidopsis thaliana
ctccaagggttcgagct

SEQ ID NO: 176746 - DNA, 17 bp, Arabidopsis thaliana
ctccactcggatcataa

SEQ ID NO: 176747 - DNA, 17 bp, Arabidopsis thaliana
ctccagtaacaaagtaa

SEQ ID NO: 176748 - DNA, 17 bp, Arabidopsis thaliana
ctcccaaaccgctaccg

SEQ ID NO: 176749 - DNA, 17 bp, Arabidopsis thaliana
ctcccaaaggcacgtgt

SEQ ID NO: 176750 - DNA, 17 bp, Arabidopsis thaliana
ctcccaatggcccattt

SEQ ID NO: 176751 - DNA, 17 bp, Arabidopsis thaliana
ctccccacctgacaatg

SEQ ID NO: 176752 - DNA, 17 bp, Arabidopsis thaliana
ctccccatcgatgtgct

SEQ ID NO: 176753 - DNA, 17 bp, Arabidopsis thaliana
ctcccctcagacggcgc

SEQ ID NO: 176754 - DNA, 17 bp, Arabidopsis thaliana
ctccccttacaatgtcg

SEQ ID NO: 176755 - DNA, 17 bp, Arabidopsis thaliana
ctcccgatcatgccaat

SEQ ID NO: 176756 - DNA, 17 bp, Arabidopsis thaliana
ctcccggcagacgcacc

SEQ ID NO: 176757 - DNA, 17 bp, Arabidopsis thaliana
ctccctcataagttgcc

SEQ ID NO: 176758 - DNA, 17 bp, Arabidopsis thaliana
ctccctgcttcttcacg

SEQ ID NO: 176759 - DNA, 17 bp, Arabidopsis thaliana
ctcccttggatgtctga

SEQ ID NO: 176760 - DNA, 17 bp, Arabidopsis thaliana
ctccgactaaccagaca

SEQ ID NO: 176761 - DNA, 17 bp, Arabidopsis thaliana
ctccgcctggggagtac

SEQ ID NO: 176762 - DNA, 17 bp, Arabidopsis thaliana
ctccggaagtgctcgtg

SEQ ID NO: 176763 - DNA, 17 bp, Arabidopsis thaliana
ctcctactgagggtcgg

SEQ ID NO: 176764 - DNA, 17 bp, Arabidopsis thaliana
ctcctatttcctctcgc

SEQ ID NO: 176765 - DNA, 17 bp, Arabidopsis thaliana
ctcctcacaaagggggt

SEQ ID NO: 176766 - DNA, 17 bp, Arabidopsis thaliana
ctcctcacctgacaatg

SEQ ID NO: 176767 - DNA, 17 bp, Arabidopsis thaliana
ctcctctaggcggttct

SEQ ID NO: 176768 - DNA, 17 bp, Arabidopsis thaliana
ctcctctcagagacata

SEQ ID NO: 176769 - DNA, 17 bp, Arabidopsis thaliana
ctcctctcagagacatt

SEQ ID NO: 176770 - DNA, 17 bp, Arabidopsis thaliana
ctcctctccgcgacgaa

SEQ ID NO: 176771 - DNA, 17 bp, Arabidopsis thaliana
ctcctctccgcgacgca

SEQ ID NO: 176772 - DNA, 17 bp, Arabidopsis thaliana
ctcctctgacagagaca

SEQ ID NO: 176773 - DNA, 17 bp, Arabidopsis thaliana
ctcctctgacagagacg

SEQ ID NO: 176774 - DNA, 17 bp, Arabidopsis thaliana
ctcctggtcttaattgg

SEQ ID NO: 176775 - DNA, 17 bp, Arabidopsis thaliana
ctcctggtggtgccctt

SEQ ID NO: 176776 - DNA, 17 bp, Arabidopsis thaliana
ctccttcaccagtgact

SEQ ID NO: 176777 - DNA, 17 bp, Arabidopsis thaliana
ctccttctgtaaccaac

SEQ ID NO: 176778 - DNA, 17 bp, Arabidopsis thaliana
ctccttctgtaaccggt

SEQ ID NO: 176779 - DNA, 17 bp, Arabidopsis thaliana
ctcgaacccttggagag

SEQ ID NO: 176780 - DNA, 17 bp, Arabidopsis thaliana
ctcgaagacgatcagat

SEQ ID NO: 176781 - DNA, 17 bp, Arabidopsis thaliana
ctcgaatcccagcagcc

SEQ ID NO: 176782 - DNA, 17 bp, Arabidopsis thaliana
ctcgaatcgcacggcct

SEQ ID NO: 176783 - DNA, 17 bp, Arabidopsis thaliana
ctcgacagaattgagaa

SEQ ID NO: 176784 - DNA, 17 bp, Arabidopsis thaliana
ctcgacggatcgcatgg

SEQ ID NO: 176785 - DNA, 17 bp, Arabidopsis thaliana
ctcgatccaaagtccgg

SEQ ID NO: 176786 - DNA, 17 bp, Arabidopsis thaliana
ctcgatccgaaactgaa

SEQ ID NO: 176787 - DNA, 17 bp, Arabidopsis thaliana
ctcgatcctatctttga

SEQ ID NO: 176788 - DNA, 17 bp, Arabidopsis thaliana
ctcgatgtctagcagtg

SEQ ID NO: 176789 - DNA, 17 bp, Arabidopsis thaliana
ctcgattcccggctggt

SEQ ID NO: 176790 - DNA, 17 bp, Arabidopsis thaliana
ctcgcaggagagataga

SEQ ID NO: 176791 - DNA, 17 bp, Arabidopsis thaliana
ctcgcaggagagatagc

SEQ ID NO: 176792 - DNA, 17 bp, Arabidopsis thaliana
ctcgcccatcgatgtgc

SEQ ID NO: 176793 - DNA, 17 bp, Arabidopsis thaliana
ctcgcgttgactacgtc

SEQ ID NO: 176794 - DNA, 17 bp, Arabidopsis thaliana
ctcgctaagagcaccat

SEQ ID NO: 176795 - DNA, 17 bp, Arabidopsis thaliana
ctcgcttgcagagagaa

SEQ ID NO: 176796 - DNA, 17 bp, Arabidopsis thaliana
ctcgcttgcagggagaa

SEQ ID NO: 176797 - DNA, 17 bp, Arabidopsis thaliana
ctcgcttggtgcaggtc

SEQ ID NO: 176798 - DNA, 17 bp, Arabidopsis thaliana
ctcggaccaggcttcat

SEQ ID NO: 176799 - DNA, 17 bp, Arabidopsis thaliana
ctcggatctggcttact

SEQ ID NO: 176800 - DNA, 17 bp, Arabidopsis thaliana
ctcggatgcggaaaagt

SEQ ID NO: 176801 - DNA, 17 bp, Arabidopsis thaliana
ctcggcctttcactcac

SEQ ID NO: 176802 - DNA, 17 bp, Arabidopsis thaliana
ctcggcctttcactcct

SEQ ID NO: 176803 - DNA, 17 bp, Arabidopsis thaliana
ctcggcgagatggggct

SEQ ID NO: 176804 - DNA, 17 bp, Arabidopsis thaliana
ctcgggcagtcctacca

SEQ ID NO: 176805 - DNA, 17 bp, Arabidopsis thaliana
ctcgggggtcccagttc

SEQ ID NO: 176806 - DNA, 17 bp, Arabidopsis thaliana
ctcggtacaatgtagcc

SEQ ID NO: 176807 - DNA, 17 bp, Arabidopsis thaliana
ctcggtctcaggcacag

SEQ ID NO: 176808 - DNA, 17 bp, Arabidopsis thaliana
ctcggtggcggtgttct

SEQ ID NO: 176809 - DNA, 17 bp, Arabidopsis thaliana
ctcggtgggccggtttc

SEQ ID NO: 176810 - DNA, 17 bp, Arabidopsis thaliana
ctcggttcgtgcccggg

SEQ ID NO: 176811 - DNA, 17 bp, Arabidopsis thaliana
ctcggttggctacggca

SEQ ID NO: 176812 - DNA, 17 bp, Arabidopsis thaliana
ctcgtacgagacctttg

SEQ ID NO: 176813 - DNA, 17 bp, Arabidopsis thaliana
ctcgtagttgaaccttg

SEQ ID NO: 176814 - DNA, 17 bp, Arabidopsis thaliana
ctcgtcggcggctttcc

SEQ ID NO: 176815 - DNA, 17 bp, Arabidopsis thaliana
ctcgttaggttcaaaca

SEQ ID NO: 176816 - DNA, 17 bp, Arabidopsis thaliana
ctcgtttgcaagtttac

SEQ ID NO: 176817 - DNA, 17 bp, Arabidopsis thaliana
ctcgtttttgatcagca

SEQ ID NO: 176818 - DNA, 17 bp, Arabidopsis thaliana
ctctaacaggccttgga

SEQ ID NO: 176819 - DNA, 17 bp, Arabidopsis thaliana
ctctaagtcagaatcca

SEQ ID NO: 176820 - DNA, 17 bp, Arabidopsis thaliana
ctctaagtccaacatag

SEQ ID NO: 176821 - DNA, 17 bp, Arabidopsis thaliana
ctctaagtcggaatcct

SEQ ID NO: 176822 - DNA, 17 bp, Arabidopsis thaliana
ctctaattcgttcgact

SEQ ID NO: 176823 - DNA, 17 bp, Arabidopsis thaliana
ctctaattcgttcgagt

SEQ ID NO: 176824 - DNA, 17 bp, Arabidopsis thaliana
ctctacaggatgcgact

SEQ ID NO: 176825 - DNA, 17 bp, Arabidopsis thaliana
ctctacagtattgaacc

SEQ ID NO: 176826 - DNA, 17 bp, Arabidopsis thaliana
ctctacgctatgttgga

SEQ ID NO: 176827 - DNA, 17 bp, Arabidopsis thaliana
ctctagtccgactttgt

SEQ ID NO: 176828 - DNA, 17 bp, Arabidopsis thaliana
ctctatccatcctgagt

SEQ ID NO: 176829 - DNA, 17 bp, Arabidopsis thaliana
ctctattggcatggcac

SEQ ID NO: 176830 - DNA, 17 bp, Arabidopsis thaliana
ctctcaaaatgattgtc

SEQ ID NO: 176831 - DNA, 17 bp, Arabidopsis thaliana
ctctcatgccgtgcttc

SEQ ID NO: 176832 - DNA, 17 bp, Arabidopsis thaliana
ctctccaagggttcgag

SEQ ID NO: 176833 - DNA, 17 bp, Arabidopsis thaliana
ctctccaagggttcgtc

SEQ ID NO: 176834 - DNA, 17 bp, Arabidopsis thaliana
ctctccaggatccttgt

SEQ ID NO: 176835 - DNA, 17 bp, Arabidopsis thaliana
ctctcgcatcgatgaag

SEQ ID NO: 176836 - DNA, 17 bp, Arabidopsis thaliana
ctctcgctcttctttct

SEQ ID NO: 176837 - DNA, 17 bp, Arabidopsis thaliana
ctctcggtgggccggtt

SEQ ID NO: 176838 - DNA, 17 bp, Arabidopsis thaliana
ctctctagggctttgtc

SEQ ID NO: 176839 - DNA, 17 bp, Arabidopsis thaliana
ctctctagttctgtttc

SEQ ID NO: 176840 - DNA, 17 bp, Arabidopsis thaliana
ctctctgggtccctacc

SEQ ID NO: 176841 - DNA, 17 bp, Arabidopsis thaliana
ctctctgggtccctccc

SEQ ID NO: 176842 - DNA, 17 bp, Arabidopsis thaliana
ctctcttctccaaggtt

SEQ ID NO: 176843 - DNA, 17 bp, Arabidopsis thaliana
ctctcttctgtcaagat

SEQ ID NO: 176844 - DNA, 17 bp, Arabidopsis thaliana
ctctcttgtatctgatt

SEQ ID NO: 176845 - DNA, 17 bp, Arabidopsis thaliana
ctctgagggctgggctc

SEQ ID NO: 176846 - DNA, 17 bp, Arabidopsis thaliana
ctctgatggtgcaagga

SEQ ID NO: 176847 - DNA, 17 bp, Arabidopsis thaliana
ctctgatggtgcaaggt

SEQ ID NO: 176848 - DNA, 17 bp, Arabidopsis thaliana
ctctgccaatgctgcgg

SEQ ID NO: 176849 - DNA, 17 bp, Arabidopsis thaliana
ctctgcctttgatgagt

SEQ ID NO: 176850 - DNA, 17 bp, Arabidopsis thaliana
ctctgcgtaggctaaga

SEQ ID NO: 176851 - DNA, 17 bp, Arabidopsis thaliana
ctctgctaggcggacta

SEQ ID NO: 176852 - DNA, 17 bp, Arabidopsis thaliana
ctctgctgcgctcctga

SEQ ID NO: 176853 - DNA, 17 bp, Arabidopsis thaliana
ctctgctgggccgacac

SEQ ID NO: 176854 - DNA, 17 bp, Arabidopsis thaliana
ctctggatacattagca

SEQ ID NO: 176855 - DNA, 17 bp, Arabidopsis thaliana
ctctggtggaagcccgc

SEQ ID NO: 176856 - DNA, 17 bp, Arabidopsis thaliana
ctctggtggaggctcgc

SEQ ID NO: 176857 - DNA, 17 bp, Arabidopsis thaliana
ctctgtcagaggagatg

SEQ ID NO: 176858 - DNA, 17 bp, Arabidopsis thaliana
ctctgtctacaattttg

SEQ ID NO: 176859 - DNA, 17 bp, Arabidopsis thaliana
ctctgtgctggcgacgc

SEQ ID NO: 176860 - DNA, 17 bp, Arabidopsis thaliana
ctctgttagatggactt

SEQ ID NO: 176861 - DNA, 17 bp, Arabidopsis thaliana
ctctgttctgcagattg

SEQ ID NO: 176862 - DNA, 17 bp, Arabidopsis thaliana
ctcttaaaccgacttct

SEQ ID NO: 176863 - DNA, 17 bp, Arabidopsis thaliana
ctcttactgagattaac

SEQ ID NO: 176864 - DNA, 17 bp, Arabidopsis thaliana
ctcttcgatgcgtgacg

SEQ ID NO: 176865 - DNA, 17 bp, Arabidopsis thaliana
ctcttctctggtccatc

SEQ ID NO: 176866 - DNA, 17 bp, Arabidopsis thaliana
ctcttctttctccacca

SEQ ID NO: 176867 - DNA, 17 bp, Arabidopsis thaliana
ctcttgatcatatccct

SEQ ID NO: 176868 - DNA, 17 bp, Arabidopsis thaliana
ctcttgcgggagaaaga

SEQ ID NO: 176869 - DNA, 17 bp, Arabidopsis thaliana
ctcttgcgggagaagcc

SEQ ID NO: 176870 - DNA, 17 bp, Arabidopsis thaliana
ctcttgtagttgctgat

SEQ ID NO: 176871 - DNA, 17 bp, Arabidopsis thaliana
ctcttgtgcccgagcct

SEQ ID NO: 176872 - DNA, 17 bp, Arabidopsis thaliana
ctctttcgagggtcgaa

SEQ ID NO: 176873 - DNA, 17 bp, Arabidopsis thaliana
ctctttcgtctaagggt

SEQ ID NO: 176874 - DNA, 17 bp, Arabidopsis thaliana
ctctttgagacatctcg

SEQ ID NO: 176875 - DNA, 17 bp, Arabidopsis thaliana
ctctttgtttaccagtt

SEQ ID NO: 176876 - DNA, 17 bp, Arabidopsis thaliana
ctctttttcttgacctt

SEQ ID NO: 176877 - DNA, 17 bp, Arabidopsis thaliana
ctctttttttcttcagg

SEQ ID NO: 176878 - DNA, 17 bp, Arabidopsis thaliana
ctgaaagtgactacatc

SEQ ID NO: 176879 - DNA, 17 bp, Arabidopsis thaliana
ctgaacaggacttggaa

SEQ ID NO: 176880 - DNA, 17 bp, Arabidopsis thaliana
ctgaacgacttccagac

SEQ ID NO: 176881 - DNA, 17 bp, Arabidopsis thaliana
ctgaacgcctctaagta

SEQ ID NO: 176882 - DNA, 17 bp, Arabidopsis thaliana
ctgaacgcctctaagtc

SEQ ID NO: 176883 - DNA, 17 bp, Arabidopsis thaliana
ctgaagaagacttggaa

SEQ ID NO: 176884 - DNA, 17 bp, Arabidopsis thaliana
ctgaagaaggctgaaag

SEQ ID NO: 176885 - DNA, 17 bp, Arabidopsis thaliana
ctgaagaggacttagaa

SEQ ID NO: 176886 - DNA, 17 bp, Arabidopsis thaliana
ctgaagaggacttggaa

SEQ ID NO: 176887 - DNA, 17 bp, Arabidopsis thaliana
ctgaagctgccagcatg

SEQ ID NO: 176888 - DNA, 17 bp, Arabidopsis thaliana
ctgaagtagggggcaag

SEQ ID NO: 176889 - DNA, 17 bp, Arabidopsis thaliana
ctgaagtgtttggggga

SEQ ID NO: 176890 - DNA, 17 bp, Arabidopsis thaliana
ctgaagtgtttgggggg

SEQ ID NO: 176891 - DNA, 17 bp, Arabidopsis thaliana
ctgaatcacagggtttg

SEQ ID NO: 176892 - DNA, 17 bp, Arabidopsis thaliana
ctgaatctcagtggatc

SEQ ID NO: 176893 - DNA, 17 bp, Arabidopsis thaliana
ctgaatctctatagctt

SEQ ID NO: 176894 - DNA, 17 bp, Arabidopsis thaliana
ctgaatgccctattagt

SEQ ID NO: 176895 - DNA, 17 bp, Arabidopsis thaliana
ctgaattcgcctggcca

SEQ ID NO: 176896 - DNA, 17 bp, Arabidopsis thaliana
ctgaattgtcaacgtct

SEQ ID NO: 176897 - DNA, 17 bp, Arabidopsis thaliana
ctgacacggggaggtag

SEQ ID NO: 176898 - DNA, 17 bp, Arabidopsis thaliana
ctgacagaagagagtga

SEQ ID NO: 176899 - DNA, 17 bp, Arabidopsis thaliana
ctgacagaagatagaga

SEQ ID NO: 176900 - DNA, 17 bp, Arabidopsis thaliana
ctgacaggcataccggg

SEQ ID NO: 176901 - DNA, 17 bp, Arabidopsis thaliana
ctgaccagcaaatacac

SEQ ID NO: 176902 - DNA, 17 bp, Arabidopsis thaliana
ctgaccagcaaatacag

SEQ ID NO: 176903 - DNA, 17 bp, Arabidopsis thaliana
ctgaccaggttgtttgc

SEQ ID NO: 176904 - DNA, 17 bp, Arabidopsis thaliana
ctgaccgccgagcttct

SEQ ID NO: 176905 - DNA, 17 bp, Arabidopsis thaliana
ctgaccttagctcagtg

SEQ ID NO: 176906 - DNA, 17 bp, Arabidopsis thaliana
ctgaccttagctcagtt

SEQ ID NO: 176907 - DNA, 17 bp, Arabidopsis thaliana
ctgacgcggattacgga

SEQ ID NO: 176908 - DNA, 17 bp, Arabidopsis thaliana
ctgacgcggattacggt

SEQ ID NO: 176909 - DNA, 17 bp, Arabidopsis thaliana
ctgacttgggtataggg

SEQ ID NO: 176910 - DNA, 17 bp, Arabidopsis thaliana
ctgagaatgctgacatg

SEQ ID NO: 176911 - DNA, 17 bp, Arabidopsis thaliana
ctgagattcagcccttt

SEQ ID NO: 176912 - DNA, 17 bp, Arabidopsis thaliana
ctgagattcagcctttt

SEQ ID NO: 176913 - DNA, 17 bp, Arabidopsis thaliana
ctgagccgtgccaatat

SEQ ID NO: 176914 - DNA, 17 bp, Arabidopsis thaliana
ctgaggaaactcattac

SEQ ID NO: 176915 - DNA, 17 bp, Arabidopsis thaliana
ctgaggagatcggtgtg

SEQ ID NO: 176916 - DNA, 17 bp, Arabidopsis thaliana
ctgagggctgggctcgg

SEQ ID NO: 176917 - DNA, 17 bp, Arabidopsis thaliana
ctgagtcgcagcatcaa

SEQ ID NO: 176918 - DNA, 17 bp, Arabidopsis thaliana
ctgataatggacatagc

SEQ ID NO: 176919 - DNA, 17 bp, Arabidopsis thaliana
ctgatatgatcaaaaca

SEQ ID NO: 176920 - DNA, 17 bp, Arabidopsis thaliana
ctgatctgaagaaggtt

SEQ ID NO: 176921 - DNA, 17 bp, Arabidopsis thaliana
ctgatctgcatcaccta

SEQ ID NO: 176922 - DNA, 17 bp, Arabidopsis thaliana
ctgatgatgctaaccgg

SEQ ID NO: 176923 - DNA, 17 bp, Arabidopsis thaliana
ctgatgatgctgaccgg

SEQ ID NO: 176924 - DNA, 17 bp, Arabidopsis thaliana
ctgatgcccgcgtcgcg

SEQ ID NO: 176925 - DNA, 17 bp, Arabidopsis thaliana
ctgatggtgctgaccgg

SEQ ID NO: 176926 - DNA, 17 bp, Arabidopsis thaliana
ctgattataaaaaacag

SEQ ID NO: 176927 - DNA, 17 bp, Arabidopsis thaliana
ctgattggtgcagtatg

SEQ ID NO: 176928 - DNA, 17 bp, Arabidopsis thaliana
ctgatttatctgcaaca

SEQ ID NO: 176929 - DNA, 17 bp, Arabidopsis thaliana
ctgatttgcgtacattc

SEQ ID NO: 176930 - DNA, 17 bp, Arabidopsis thaliana
ctgcaaaagatctcaag

SEQ ID NO: 176931 - DNA, 17 bp, Arabidopsis thaliana
ctgcaaagatatggtgc

SEQ ID NO: 176932 - DNA, 17 bp, Arabidopsis thaliana
ctgcaacggagctacgc

SEQ ID NO: 176933 - DNA, 17 bp, Arabidopsis thaliana
ctgcaactcttgcggga

SEQ ID NO: 176934 - DNA, 17 bp, Arabidopsis thaliana
ctgcaagggctggctca

SEQ ID NO: 176935 - DNA, 17 bp, Arabidopsis thaliana
ctgcaccctcaaacaca

SEQ ID NO: 176936 - DNA, 17 bp, Arabidopsis thaliana
ctgcacgggccggctca

SEQ ID NO: 176937 - DNA, 17 bp, Arabidopsis thaliana
ctgcacgggcctggctc

SEQ ID NO: 176938 - DNA, 17 bp, Arabidopsis thaliana
ctgcagattggcttctt

SEQ ID NO: 176939 - DNA, 17 bp, Arabidopsis thaliana
ctgcaggatatccaacc

SEQ ID NO: 176940 - DNA, 17 bp, Arabidopsis thaliana
ctgcagtgacgcaggca

SEQ ID NO: 176941 - DNA, 17 bp, Arabidopsis thaliana
ctgcataacagctacga

SEQ ID NO: 176942 - DNA, 17 bp, Arabidopsis thaliana
ctgcataacagctagct

SEQ ID NO: 176943 - DNA, 17 bp, Arabidopsis thaliana
ctgcatatgggcagtga

SEQ ID NO: 176944 - DNA, 17 bp, Arabidopsis thaliana
ctgcatggctgtcggtc

SEQ ID NO: 176945 - DNA, 17 bp, Arabidopsis thaliana
ctgcatggctgtcgtca

SEQ ID NO: 176946 - DNA, 17 bp, Arabidopsis thaliana
ctgcatgggcctggctc

SEQ ID NO: 176947 - DNA, 17 bp, Arabidopsis thaliana
ctgcatgtgtgacgatg

SEQ ID NO: 176948 - DNA, 17 bp, Arabidopsis thaliana
ctgccaaaggagatttg

SEQ ID NO: 176949 - DNA, 17 bp, Arabidopsis thaliana
ctgccacgatccactga

SEQ ID NO: 176950 - DNA, 17 bp, Arabidopsis thaliana
ctgccacggtacagacc

SEQ ID NO: 176951 - DNA, 17 bp, Arabidopsis thaliana
ctgccatcttgagattg

SEQ ID NO: 176952 - DNA, 17 bp, Arabidopsis thaliana
ctgcccaccctggaaac

SEQ ID NO: 176953 - DNA, 17 bp, Arabidopsis thaliana
ctgcccccggcgcgtcc

SEQ ID NO: 176954 - DNA, 17 bp, Arabidopsis thaliana
ctgcccgttgctctgat

SEQ ID NO: 176955 - DNA, 17 bp, Arabidopsis thaliana
ctgccctatcaactttc

SEQ ID NO: 176956 - DNA, 17 bp, Arabidopsis thaliana
ctgccctttgtacacac

SEQ ID NO: 176957 - DNA, 17 bp, Arabidopsis thaliana
ctgccgactgtacgcca

SEQ ID NO: 176958 - DNA, 17 bp, Arabidopsis thaliana
ctgccgcatctttgtac

SEQ ID NO: 176959 - DNA, 17 bp, Arabidopsis thaliana
ctgccgtgatcgtggtc

SEQ ID NO: 176960 - DNA, 17 bp, Arabidopsis thaliana
ctgcctgggtgtcacaa

SEQ ID NO: 176961 - DNA, 17 bp, Arabidopsis thaliana
ctgcgaaagcatttgcc

SEQ ID NO: 176962 - DNA, 17 bp, Arabidopsis thaliana
ctgcgagaggtcccgcg

SEQ ID NO: 176963 - DNA, 17 bp, Arabidopsis thaliana
ctgcgagccttttgcat

SEQ ID NO: 176964 - DNA, 17 bp, Arabidopsis thaliana
ctgcgatggcaaccaca

SEQ ID NO: 176965 - DNA, 17 bp, Arabidopsis thaliana
ctgcgatggtacattaa

SEQ ID NO: 176966 - DNA, 17 bp, Arabidopsis thaliana
ctgcgcctggatgtggg

SEQ ID NO: 176967 - DNA, 17 bp, Arabidopsis thaliana
ctgcggaaggatcattg

SEQ ID NO: 176968 - DNA, 17 bp, Arabidopsis thaliana
ctgcggcatctttgtac

SEQ ID NO: 176969 - DNA, 17 bp, Arabidopsis thaliana
ctgcggcgagatcggag

SEQ ID NO: 176970 - DNA, 17 bp, Arabidopsis thaliana
ctgcgggaagcatttgc

SEQ ID NO: 176971 - DNA, 17 bp, Arabidopsis thaliana
ctgcgggtaacgtccat

SEQ ID NO: 176972 - DNA, 17 bp, Arabidopsis thaliana
ctgcggttttgtgtgac

SEQ ID NO: 176973 - DNA, 17 bp, Arabidopsis thaliana
ctgcgtgggcgaatatt

SEQ ID NO: 176974 - DNA, 17 bp, Arabidopsis thaliana
ctgcgtggtaactggta

SEQ ID NO: 176975 - DNA, 17 bp, Arabidopsis thaliana
ctgctaacaggggatat

SEQ ID NO: 176976 - DNA, 17 bp, Arabidopsis thaliana
ctgctaactagctacgt

SEQ ID NO: 176977 - DNA, 17 bp, Arabidopsis thaliana
ctgctaagccaccaaaa

SEQ ID NO: 176978 - DNA, 17 bp, Arabidopsis thaliana
ctgctaggcggactact

SEQ ID NO: 176979 - DNA, 17 bp, Arabidopsis thaliana
ctgctcaacaagatgga

SEQ ID NO: 176980 - DNA, 17 bp, Arabidopsis thaliana
ctgctcacctctctttc

SEQ ID NO: 176981 - DNA, 17 bp, Arabidopsis thaliana
ctgctccgatgcaaccg

SEQ ID NO: 176982 - DNA, 17 bp, Arabidopsis thaliana
ctgctctgctaggcgga

SEQ ID NO: 176983 - DNA, 17 bp, Arabidopsis thaliana
ctgctgacgaaggtaca

SEQ ID NO: 176984 - DNA, 17 bp, Arabidopsis thaliana
ctgctgacgttgagccc

SEQ ID NO: 176985 - DNA, 17 bp, Arabidopsis thaliana
ctgctgagaacgggagg

SEQ ID NO: 176986 - DNA, 17 bp, Arabidopsis thaliana
ctgctgatgtggcaccg

SEQ ID NO: 176987 - DNA, 17 bp, Arabidopsis thaliana
ctgctgccttccttgga

SEQ ID NO: 176988 - DNA, 17 bp, Arabidopsis thaliana
ctgctggtccggtctca

SEQ ID NO: 176989 - DNA, 17 bp, Arabidopsis thaliana
ctgcttactagctacgt

SEQ ID NO: 176990 - DNA, 17 bp, Arabidopsis thaliana
ctgcttagtggaaagaa

SEQ ID NO: 176991 - DNA, 17 bp, Arabidopsis thaliana
ctgcttagtggaaagac

SEQ ID NO: 176992 - DNA, 17 bp, Arabidopsis thaliana
ctgcttcaggattactc

SEQ ID NO: 176993 - DNA, 17 bp, Arabidopsis thaliana
ctgcttcgtttgtattc

SEQ ID NO: 176994 - DNA, 17 bp, Arabidopsis thaliana
ctggaaacggctcagcc

SEQ ID NO: 176995 - DNA, 17 bp, Arabidopsis thaliana
ctggaagcggtctcggt

SEQ ID NO: 176996 - DNA, 17 bp, Arabidopsis thaliana
ctggaatacttgaacta

SEQ ID NO: 176997 - DNA, 17 bp, Arabidopsis thaliana
ctggaatatgtccaatg

SEQ ID NO: 176998 - DNA, 17 bp, Arabidopsis thaliana
ctggaccttgtgttgcc

SEQ ID NO: 176999 - DNA, 17 bp, Arabidopsis thaliana
ctggacggcagatccaa

SEQ ID NO: 177000 - DNA, 17 bp, Arabidopsis thaliana
ctggacgtggtctgaga

SEQ ID NO: 177001 - DNA, 17 bp, Arabidopsis thaliana
ctggagaagcagggcaa

SEQ ID NO: 177002 - DNA, 17 bp, Arabidopsis thaliana
ctggagaagcagggcac

SEQ ID NO: 177003 - DNA, 17 bp, Arabidopsis thaliana
ctggagaagcgtcctca

SEQ ID NO: 177004 - DNA, 17 bp, Arabidopsis thaliana
ctggagaccaaaccctt

SEQ ID NO: 177005 - DNA, 17 bp, Arabidopsis thaliana
ctggagatgcttcaacc

SEQ ID NO: 177006 - DNA, 17 bp, Arabidopsis thaliana
ctggagctcggacgcaa

SEQ ID NO: 177007 - DNA, 17 bp, Arabidopsis thaliana
ctggagctcggacgcga

SEQ ID NO: 177008 - DNA, 17 bp, Arabidopsis thaliana
ctggagtcgcaccaggg

SEQ ID NO: 177009 - DNA, 17 bp, Arabidopsis thaliana
ctggatacattagcata

SEQ ID NO: 177010 - DNA, 17 bp, Arabidopsis thaliana
ctggatacattagcatg

SEQ ID NO: 177011 - DNA, 17 bp, Arabidopsis thaliana
ctggatacttattaggt

SEQ ID NO: 177012 - DNA, 17 bp, Arabidopsis thaliana
ctggatatttaagcatg

SEQ ID NO: 177013 - DNA, 17 bp, Arabidopsis thaliana
ctggatcagcttggtgt

SEQ ID NO: 177014 - DNA, 17 bp, Arabidopsis thaliana
ctggattatgactgaac

SEQ ID NO: 177015 - DNA, 17 bp, Arabidopsis thaliana
ctggatttccaacggga

SEQ ID NO: 177016 - DNA, 17 bp, Arabidopsis thaliana
ctggcagaatgcttggc

SEQ ID NO: 177017 - DNA, 17 bp, Arabidopsis thaliana
ctggcaggatcaaccag

SEQ ID NO: 177018 - DNA, 17 bp, Arabidopsis thaliana
ctggccgagagaggtgg

SEQ ID NO: 177019 - DNA, 17 bp, Arabidopsis thaliana
ctggccgcggaatgaac

SEQ ID NO: 177020 - DNA, 17 bp, Arabidopsis thaliana
ctggcgacgcatcattc

SEQ ID NO: 177021 - DNA, 17 bp, Arabidopsis thaliana
ctggcgatgcgggatga

SEQ ID NO: 177022 - DNA, 17 bp, Arabidopsis thaliana
ctggctcagaaggaacg

SEQ ID NO: 177023 - DNA, 17 bp, Arabidopsis thaliana
ctggctcttgccccgac

SEQ ID NO: 177024 - DNA, 17 bp, Arabidopsis thaliana
ctggctggccggtccgc

SEQ ID NO: 177025 - DNA, 17 bp, Arabidopsis thaliana
ctggcttgtggcagcca

SEQ ID NO: 177026 - DNA, 17 bp, Arabidopsis thaliana
ctggcttttcaaccaag

SEQ ID NO: 177027 - DNA, 17 bp, Arabidopsis thaliana
ctgggaacggctctctc

SEQ ID NO: 177028 - DNA, 17 bp, Arabidopsis thaliana
ctgggcgtgtcggggaa

SEQ ID NO: 177029 - DNA, 17 bp, Arabidopsis thaliana
ctgggctcgggggtccc

SEQ ID NO: 177030 - DNA, 17 bp, Arabidopsis thaliana
ctgggctttcaagagtc

SEQ ID NO: 177031 - DNA, 17 bp, Arabidopsis thaliana
ctggggagattacgtcc

SEQ ID NO: 177032 - DNA, 17 bp, Arabidopsis thaliana
ctggggcggcacatctg

SEQ ID NO: 177033 - DNA, 17 bp, Arabidopsis thaliana
ctggggtgcgagaggtc

SEQ ID NO: 177034 - DNA, 17 bp, Arabidopsis thaliana
ctggggttagaccgtcg

SEQ ID NO: 177035 - DNA, 17 bp, Arabidopsis thaliana
ctgggttttgggatcat

SEQ ID NO: 177036 - DNA, 17 bp, Arabidopsis thaliana
ctggtaaacaaagtgat

SEQ ID NO: 177037 - DNA, 17 bp, Arabidopsis thaliana
ctggtaaatgggatgga

SEQ ID NO: 177038 - DNA, 17 bp, Arabidopsis thaliana
ctggtaatcctgatgct

SEQ ID NO: 177039 - DNA, 17 bp, Arabidopsis thaliana
ctggtacagacagacgt

SEQ ID NO: 177040 - DNA, 17 bp, Arabidopsis thaliana
ctggtattcatattggg

SEQ ID NO: 177041 - DNA, 17 bp, Arabidopsis thaliana
ctggtcaggtagtggta

SEQ ID NO: 177042 - DNA, 17 bp, Arabidopsis thaliana
ctggtccatcatcccca

SEQ ID NO: 177043 - DNA, 17 bp, Arabidopsis thaliana
ctggtccgagaggatga

SEQ ID NO: 177044 - DNA, 17 bp, Arabidopsis thaliana
ctggtcgcatcctgtag

SEQ ID NO: 177045 - DNA, 17 bp, Arabidopsis thaliana
ctggtcggatgcggaac

SEQ ID NO: 177046 - DNA, 17 bp, Arabidopsis thaliana
ctggtctagagattgat

SEQ ID NO: 177047 - DNA, 17 bp, Arabidopsis thaliana
ctggtctcccgtgtgtt

SEQ ID NO: 177048 - DNA, 17 bp, Arabidopsis thaliana
ctggtctttttttcttg

SEQ ID NO: 177049 - DNA, 17 bp, Arabidopsis thaliana
ctggtgccagcagccgc

SEQ ID NO: 177050 - DNA, 17 bp, Arabidopsis thaliana
ctggtggaggctcgcag

SEQ ID NO: 177051 - DNA, 17 bp, Arabidopsis thaliana
ctggtggcgtcaagcag

SEQ ID NO: 177052 - DNA, 17 bp, Arabidopsis thaliana
ctggttaattccgttaa

SEQ ID NO: 177053 - DNA, 17 bp, Arabidopsis thaliana
ctggttcgattccggca

SEQ ID NO: 177054 - DNA, 17 bp, Arabidopsis thaliana
ctggttcggtcggttta

SEQ ID NO: 177055 - DNA, 17 bp, Arabidopsis thaliana
ctggttcggttccggca

SEQ ID NO: 177056 - DNA, 17 bp, Arabidopsis thaliana
ctggttcgtttccggca

SEQ ID NO: 177057 - DNA, 17 bp, Arabidopsis thaliana
ctggttgatgaaccatg

SEQ ID NO: 177058 - DNA, 17 bp, Arabidopsis thaliana
ctggttgttggacgacg

SEQ ID NO: 177059 - DNA, 17 bp, Arabidopsis thaliana
ctggtttagtcactttc

SEQ ID NO: 177060 - DNA, 17 bp, Arabidopsis thaliana
ctggtttcacagagcag

SEQ ID NO: 177061 - DNA, 17 bp, Arabidopsis thaliana
ctggtttttgctgcaac

SEQ ID NO: 177062 - DNA, 17 bp, Arabidopsis thaliana
ctgtaactccacttcct

SEQ ID NO: 177063 - DNA, 17 bp, Arabidopsis thaliana
ctgtagacgattaggat

SEQ ID NO: 177064 - DNA, 17 bp, Arabidopsis thaliana
ctgtagacggatcgtcc

SEQ ID NO: 177065 - DNA, 17 bp, Arabidopsis thaliana
ctgtagatggatcactc

SEQ ID NO: 177066 - DNA, 17 bp, Arabidopsis thaliana
ctgtagatggatcatgc

SEQ ID NO: 177067 - DNA, 17 bp, Arabidopsis thaliana
ctgtagatggatctcgg

SEQ ID NO: 177068 - DNA, 17 bp, Arabidopsis thaliana
ctgtagatggatctgat

SEQ ID NO: 177069 - DNA, 17 bp, Arabidopsis thaliana
ctgtagatggatctgcg

SEQ ID NO: 177070 - DNA, 17 bp, Arabidopsis thaliana
ctgtagatggatctgtg

SEQ ID NO: 177071 - DNA, 17 bp, Arabidopsis thaliana
ctgtaggtaaaaacatc

SEQ ID NO: 177072 - DNA, 17 bp, Arabidopsis thaliana
ctgtatgcaggccgacc

SEQ ID NO: 177073 - DNA, 17 bp, Arabidopsis thaliana
ctgtattagcaactgtt

SEQ ID NO: 177074 - DNA, 17 bp, Arabidopsis thaliana
ctgtcaatctctgatgg

SEQ ID NO: 177075 - DNA, 17 bp, Arabidopsis thaliana
ctgtcaccaatgagcag

SEQ ID NO: 177076 - DNA, 17 bp, Arabidopsis thaliana
ctgtcacgattgggcac

SEQ ID NO: 177077 - DNA, 17 bp, Arabidopsis thaliana
ctgtcagaccgccgtgc

SEQ ID NO: 177078 - DNA, 17 bp, Arabidopsis thaliana
ctgtccaaaacagaacg

SEQ ID NO: 177079 - DNA, 17 bp, Arabidopsis thaliana
ctgtcctgttacctgat

SEQ ID NO: 177080 - DNA, 17 bp, Arabidopsis thaliana
ctgtcctttccgtcaac

SEQ ID NO: 177081 - DNA, 17 bp, Arabidopsis thaliana
ctgtcggccaaggtgtg

SEQ ID NO: 177082 - DNA, 17 bp, Arabidopsis thaliana
ctgtcgggacccgaaag

SEQ ID NO: 177083 - DNA, 17 bp, Arabidopsis thaliana
ctgtcgtaccttgttgc

SEQ ID NO: 177084 - DNA, 17 bp, Arabidopsis thaliana
ctgtcgtccaggtaggc

SEQ ID NO: 177085 - DNA, 17 bp, Arabidopsis thaliana
ctgtcgtctcggttcgc

SEQ ID NO: 177086 - DNA, 17 bp, Arabidopsis thaliana
ctgtctacgagtcgggt

SEQ ID NO: 177087 - DNA, 17 bp, Arabidopsis thaliana
ctgtctggttaattccg

SEQ ID NO: 177088 - DNA, 17 bp, Arabidopsis thaliana
ctgtcttcaatttccaa

SEQ ID NO: 177089 - DNA, 17 bp, Arabidopsis thaliana
ctgtgaaaccagcctcc

SEQ ID NO: 177090 - DNA, 17 bp, Arabidopsis thaliana
ctgtgaaactgcgaatg

SEQ ID NO: 177091 - DNA, 17 bp, Arabidopsis thaliana
ctgtgaatggcgactca

SEQ ID NO: 177092 - DNA, 17 bp, Arabidopsis thaliana
ctgtgatccagacgaca

SEQ ID NO: 177093 - DNA, 17 bp, Arabidopsis thaliana
ctgtgatgcccttagat

SEQ ID NO: 177094 - DNA, 17 bp, Arabidopsis thaliana
ctgtgcatctatctact

SEQ ID NO: 177095 - DNA, 17 bp, Arabidopsis thaliana
ctgtgcgaaagggtcct

SEQ ID NO: 177096 - DNA, 17 bp, Arabidopsis thaliana
ctgtgcgtatcgacccg

SEQ ID NO: 177097 - DNA, 17 bp, Arabidopsis thaliana
ctgtgctaaacctttgt

SEQ ID NO: 177098 - DNA, 17 bp, Arabidopsis thaliana
ctgtgctggcgacgcat

SEQ ID NO: 177099 - DNA, 17 bp, Arabidopsis thaliana
ctgtggaagaggaggga

SEQ ID NO: 177100 - DNA, 17 bp, Arabidopsis thaliana
ctgtggactgcttggtg

SEQ ID NO: 177101 - DNA, 17 bp, Arabidopsis thaliana
ctgtggctggccagtta

SEQ ID NO: 177102 - DNA, 17 bp, Arabidopsis thaliana
ctgtggtcacagctgtc

SEQ ID NO: 177103 - DNA, 17 bp, Arabidopsis thaliana
ctgttaaaagataacgc

SEQ ID NO: 177104 - DNA, 17 bp, Arabidopsis thaliana
ctgttaactagctacgt

SEQ ID NO: 177105 - DNA, 17 bp, Arabidopsis thaliana
ctgttagacgacaaaga

SEQ ID NO: 177106 - DNA, 17 bp, Arabidopsis thaliana
ctgttagggtctaatct

SEQ ID NO: 177107 - DNA, 17 bp, Arabidopsis thaliana
ctgttatccatttcagt

SEQ ID NO: 177108 - DNA, 17 bp, Arabidopsis thaliana
ctgttatccctctcata

SEQ ID NO: 177109 - DNA, 17 bp, Arabidopsis thaliana
ctgttcatgagctccac

SEQ ID NO: 177110 - DNA, 17 bp, Arabidopsis thaliana
ctgttctataggctcta

SEQ ID NO: 177111 - DNA, 17 bp, Arabidopsis thaliana
ctgttgcagataaatcg

SEQ ID NO: 177112 - DNA, 17 bp, Arabidopsis thaliana
ctgttgcgggccagttc

SEQ ID NO: 177113 - DNA, 17 bp, Arabidopsis thaliana
ctgttgtgagtacggaa

SEQ ID NO: 177114 - DNA, 17 bp, Arabidopsis thaliana
ctgttgtgagtacggac

SEQ ID NO: 177115 - DNA, 17 bp, Arabidopsis thaliana
ctgttgtgatctggtta

SEQ ID NO: 177116 - DNA, 17 bp, Arabidopsis thaliana
ctgtttgaaaattccaa

SEQ ID NO: 177117 - DNA, 17 bp, Arabidopsis thaliana
ctgtttgcggtagtccg

SEQ ID NO: 177118 - DNA, 17 bp, Arabidopsis thaliana
ctgtttgttgaatgtgg

SEQ ID NO: 177119 - DNA, 17 bp, Arabidopsis thaliana
ctgttttggacaggcag

SEQ ID NO: 177120 - DNA, 17 bp, Arabidopsis thaliana
ctgttttggacaggtag

SEQ ID NO: 177121 - DNA, 17 bp, Arabidopsis thaliana
ctgttttggacaggtat

SEQ ID NO: 177122 - DNA, 17 bp, Arabidopsis thaliana
ctgttttggcaataggg

SEQ ID NO: 177123 - DNA, 17 bp, Arabidopsis thaliana
ctgtttttggtcccaag

SEQ ID NO: 177124 - DNA, 17 bp, Arabidopsis thaliana
cttaaaggaattgacga

SEQ ID NO: 177125 - DNA, 17 bp, Arabidopsis thaliana
cttaaatacgcgacgga

SEQ ID NO: 177126 - DNA, 17 bp, Arabidopsis thaliana
cttaagcgaatgatgat

SEQ ID NO: 177127 - DNA, 17 bp, Arabidopsis thaliana
cttaagtcgcatcctgt

SEQ ID NO: 177128 - DNA, 17 bp, Arabidopsis thaliana
cttaatcgcatcctgta

SEQ ID NO: 177129 - DNA, 17 bp, Arabidopsis thaliana
cttaatgtgtctatgta

SEQ ID NO: 177130 - DNA, 17 bp, Arabidopsis thaliana
cttaatttcttcttgga

SEQ ID NO: 177131 - DNA, 17 bp, Arabidopsis thaliana
cttacaatctcaagacg

SEQ ID NO: 177132 - DNA, 17 bp, Arabidopsis thaliana
cttacaatctcaagata

SEQ ID NO: 177133 - DNA, 17 bp, Arabidopsis thaliana
cttacaatctcaagatg

SEQ ID NO: 177134 - DNA, 17 bp, Arabidopsis thaliana
cttacagcagtggacgg

SEQ ID NO: 177135 - DNA, 17 bp, Arabidopsis thaliana
cttaccataatctactt

SEQ ID NO: 177136 - DNA, 17 bp, Arabidopsis thaliana
cttactaaacgggtgct

SEQ ID NO: 177137 - DNA, 17 bp, Arabidopsis thaliana
cttactactacagctca

SEQ ID NO: 177138 - DNA, 17 bp, Arabidopsis thaliana
cttactcacagcttgga

SEQ ID NO: 177139 - DNA, 17 bp, Arabidopsis thaliana
cttactcgcatcctgta

SEQ ID NO: 177140 - DNA, 17 bp, Arabidopsis thaliana
cttactgatgcccgcgt

SEQ ID NO: 177141 - DNA, 17 bp, Arabidopsis thaliana
cttagaaaacaggttgg

SEQ ID NO: 177142 - DNA, 17 bp, Arabidopsis thaliana
cttagacgcatcctgta

SEQ ID NO: 177143 - DNA, 17 bp, Arabidopsis thaliana
cttagatgttctgggcc

SEQ ID NO: 177144 - DNA, 17 bp, Arabidopsis thaliana
cttagccgattccttgc

SEQ ID NO: 177145 - DNA, 17 bp, Arabidopsis thaliana
cttagccgcatcctgta

SEQ ID NO: 177146 - DNA, 17 bp, Arabidopsis thaliana
cttagcgcatcctgaga

SEQ ID NO: 177147 - DNA, 17 bp, Arabidopsis thaliana
cttagcgcatcctgtag

SEQ ID NO: 177148 - DNA, 17 bp, Arabidopsis thaliana
cttaggcccggtccgtc

SEQ ID NO: 177149 - DNA, 17 bp, Arabidopsis thaliana
cttaggcgcatcctgta

SEQ ID NO: 177150 - DNA, 17 bp, Arabidopsis thaliana
cttaggctcccaaaggc

SEQ ID NO: 177151 - DNA, 17 bp, Arabidopsis thaliana
cttagtcacatcctgta

SEQ ID NO: 177152 - DNA, 17 bp, Arabidopsis thaliana
cttagtcatcctgtaga

SEQ ID NO: 177153 - DNA, 17 bp, Arabidopsis thaliana
cttagtccacctgtaga

SEQ ID NO: 177154 - DNA, 17 bp, Arabidopsis thaliana
cttagtccatcctgtag

SEQ ID NO: 177155 - DNA, 17 bp, Arabidopsis thaliana
cttagtcccatcctgta

SEQ ID NO: 177156 - DNA, 17 bp, Arabidopsis thaliana
cttagtcgacctgtaga

SEQ ID NO: 177157 - DNA, 17 bp, Arabidopsis thaliana
cttagtcgatcctgtag

SEQ ID NO: 177158 - DNA, 17 bp, Arabidopsis thaliana
cttagtcgcaccctccc

SEQ ID NO: 177159 - DNA, 17 bp, Arabidopsis thaliana
cttagtcgcaccctgta

SEQ ID NO: 177160 - DNA, 17 bp, Arabidopsis thaliana
cttagtcgcacctgtag

SEQ ID NO: 177161 - DNA, 17 bp, Arabidopsis thaliana
cttagtcgcactgtaga

SEQ ID NO: 177162 - DNA, 17 bp, Arabidopsis thaliana
cttagtcgcactgtagg

SEQ ID NO: 177163 - DNA, 17 bp, Arabidopsis thaliana
cttagtcgcactgtctg

SEQ ID NO: 177164 - DNA, 17 bp, Arabidopsis thaliana
cttagtcgcatcccaga

SEQ ID NO: 177165 - DNA, 17 bp, Arabidopsis thaliana
cttagtcgcatcccgta

SEQ ID NO: 177166 - DNA, 17 bp, Arabidopsis thaliana
cttagtcgcatccctgt

SEQ ID NO: 177167 - DNA, 17 bp, Arabidopsis thaliana
cttagtcgcatccggta

SEQ ID NO: 177168 - DNA, 17 bp, Arabidopsis thaliana
cttagtcgcatccgtag

SEQ ID NO: 177169 - DNA, 17 bp, Arabidopsis thaliana
cttagtcgcatcctaga

SEQ ID NO: 177170 - DNA, 17 bp, Arabidopsis thaliana
cttagtcgcatcctata

SEQ ID NO: 177171 - DNA, 17 bp, Arabidopsis thaliana
cttagtcgcatcctatg

SEQ ID NO: 177172 - DNA, 17 bp, Arabidopsis thaliana
cttagtcgcatcctgaa

SEQ ID NO: 177173 - DNA, 17 bp, Arabidopsis thaliana
cttagtcgcatcctgag

SEQ ID NO: 177174 - DNA, 17 bp, Arabidopsis thaliana
cttagtcgcatcctgca

SEQ ID NO: 177175 - DNA, 17 bp, Arabidopsis thaliana
cttagtcgcatcctgcc

SEQ ID NO: 177176 - DNA, 17 bp, Arabidopsis thaliana
cttagtcgcatcctgga

SEQ ID NO: 177177 - DNA, 17 bp, Arabidopsis thaliana
cttagtcgcatcctggg

SEQ ID NO: 177178 - DNA, 17 bp, Arabidopsis thaliana
cttagtcgcatcctgta

SEQ ID NO: 177179 - DNA, 17 bp, Arabidopsis thaliana
cttagtcgcatcctgtc

SEQ ID NO: 177180 - DNA, 17 bp, Arabidopsis thaliana
cttagtcgcatcctgtg

SEQ ID NO: 177181 - DNA, 17 bp, Arabidopsis thaliana
cttagtcgcatcctgtt

SEQ ID NO: 177182 - DNA, 17 bp, Arabidopsis thaliana
cttagtcgcatccttag

SEQ ID NO: 177183 - DNA, 17 bp, Arabidopsis thaliana
cttagtcgcatccttcc

SEQ ID NO: 177184 - DNA, 17 bp, Arabidopsis thaliana
cttagtcgcatccttgt

SEQ ID NO: 177185 - DNA, 17 bp, Arabidopsis thaliana
cttagtcgcatccttta

SEQ ID NO: 177186 - DNA, 17 bp, Arabidopsis thaliana
cttagtcgcatcgtaga

SEQ ID NO: 177187 - DNA, 17 bp, Arabidopsis thaliana
cttagtcgcatctatag

SEQ ID NO: 177188 - DNA, 17 bp, Arabidopsis thaliana
cttagtcgcatctgcag

SEQ ID NO: 177189 - DNA, 17 bp, Arabidopsis thaliana
cttagtcgcatctgtag

SEQ ID NO: 177190 - DNA, 17 bp, Arabidopsis thaliana
cttagtcgcatctgtat

SEQ ID NO: 177191 - DNA, 17 bp, Arabidopsis thaliana
cttagtcgcatcttgta

SEQ ID NO: 177192 - DNA, 17 bp, Arabidopsis thaliana
cttagtcgcattctgta

SEQ ID NO: 177193 - DNA, 17 bp, Arabidopsis thaliana
cttagtcgcattgtaga

SEQ ID NO: 177194 - DNA, 17 bp, Arabidopsis thaliana
cttagtcgccctgtaga

SEQ ID NO: 177195 - DNA, 17 bp, Arabidopsis thaliana
cttagtcgctcctgtag

SEQ ID NO: 177196 - DNA, 17 bp, Arabidopsis thaliana
cttagtcgctgtagagg

SEQ ID NO: 177197 - DNA, 17 bp, Arabidopsis thaliana
cttagtcgcttccgtag

SEQ ID NO: 177198 - DNA, 17 bp, Arabidopsis thaliana
cttagtcgtatcctgga

SEQ ID NO: 177199 - DNA, 17 bp, Arabidopsis thaliana
cttagtcgtatcctgta

SEQ ID NO: 177200 - DNA, 17 bp, Arabidopsis thaliana
cttagtctcatcctgta

SEQ ID NO: 177201 - DNA, 17 bp, Arabidopsis thaliana
cttagtgcacctgtaag

SEQ ID NO: 177202 - DNA, 17 bp, Arabidopsis thaliana
cttagtgcatcctgtag

SEQ ID NO: 177203 - DNA, 17 bp, Arabidopsis thaliana
cttagtggaaagacgac

SEQ ID NO: 177204 - DNA, 17 bp, Arabidopsis thaliana
cttagttcgcatcctgt

SEQ ID NO: 177205 - DNA, 17 bp, Arabidopsis thaliana
cttagttgcatcctgta

SEQ ID NO: 177206 - DNA, 17 bp, Arabidopsis thaliana
cttataaaacaacccac

SEQ ID NO: 177207 - DNA, 17 bp, Arabidopsis thaliana
cttataagccatcttac

SEQ ID NO: 177208 - DNA, 17 bp, Arabidopsis thaliana
cttataggactccgctg

SEQ ID NO: 177209 - DNA, 17 bp, Arabidopsis thaliana
cttatcatttagaggaa

SEQ ID NO: 177210 - DNA, 17 bp, Arabidopsis thaliana
cttatcgcatcctgtag

SEQ ID NO: 177211 - DNA, 17 bp, Arabidopsis thaliana
cttatgagacaatgcag

SEQ ID NO: 177212 - DNA, 17 bp, Arabidopsis thaliana
cttatgcgtcctatctt

SEQ ID NO: 177213 - DNA, 17 bp, Arabidopsis thaliana
cttattcgcatcctgta

SEQ ID NO: 177214 - DNA, 17 bp, Arabidopsis thaliana
cttattggccttttgtc

SEQ ID NO: 177215 - DNA, 17 bp, Arabidopsis thaliana
cttattggcgcatacca

SEQ ID NO: 177216 - DNA, 17 bp, Arabidopsis thaliana
cttatttaatcccactt

SEQ ID NO: 177217 - DNA, 17 bp, Arabidopsis thaliana
cttatttctgcaggata

SEQ ID NO: 177218 - DNA, 17 bp, Arabidopsis thaliana
cttcaatccaaagatca

SEQ ID NO: 177219 - DNA, 17 bp, Arabidopsis thaliana
cttcaatccaaagatcc

SEQ ID NO: 177220 - DNA, 17 bp, Arabidopsis thaliana
cttcaatcccgccgctg

SEQ ID NO: 177221 - DNA, 17 bp, Arabidopsis thaliana
cttcaatcccgtcgctg

SEQ ID NO: 177222 - DNA, 17 bp, Arabidopsis thaliana
cttcacaggagagatag

SEQ ID NO: 177223 - DNA, 17 bp, Arabidopsis thaliana
cttcacggccggcttct

SEQ ID NO: 177224 - DNA, 17 bp, Arabidopsis thaliana
cttcactgctcggctcc

SEQ ID NO: 177225 - DNA, 17 bp, Arabidopsis thaliana
cttcaggagatgggctt

SEQ ID NO: 177226 - DNA, 17 bp, Arabidopsis thaliana
cttcagtctgatagaga

SEQ ID NO: 177227 - DNA, 17 bp, Arabidopsis thaliana
cttccaagcaatagacc

SEQ ID NO: 177228 - DNA, 17 bp, Arabidopsis thaliana
cttccagagacaggcgt

SEQ ID NO: 177229 - DNA, 17 bp, Arabidopsis thaliana
cttccagccgctggacc

SEQ ID NO: 177230 - DNA, 17 bp, Arabidopsis thaliana
cttccagccgctggctg

SEQ ID NO: 177231 - DNA, 17 bp, Arabidopsis thaliana
cttccagggtcgaatct

SEQ ID NO: 177232 - DNA, 17 bp, Arabidopsis thaliana
cttccatcttgttgagc

SEQ ID NO: 177233 - DNA, 17 bp, Arabidopsis thaliana
cttccccaacggcaaca

SEQ ID NO: 177234 - DNA, 17 bp, Arabidopsis thaliana
cttcccggctggtgcac

SEQ ID NO: 177235 - DNA, 17 bp, Arabidopsis thaliana
cttccgacaaaagatcc

SEQ ID NO: 177236 - DNA, 17 bp, Arabidopsis thaliana
cttccgacaaaagatct

SEQ ID NO: 177237 - DNA, 17 bp, Arabidopsis thaliana
cttccgagcccactatg

SEQ ID NO: 177238 - DNA, 17 bp, Arabidopsis thaliana
cttccgctgttgcagag

SEQ ID NO: 177239 - DNA, 17 bp, Arabidopsis thaliana
cttccgtaattacaaag

SEQ ID NO: 177240 - DNA, 17 bp, Arabidopsis thaliana
cttcctccgtgaccacc

SEQ ID NO: 177241 - DNA, 17 bp, Arabidopsis thaliana
cttcctctttatattta

SEQ ID NO: 177242 - DNA, 17 bp, Arabidopsis thaliana
cttcctctttgtattga

SEQ ID NO: 177243 - DNA, 17 bp, Arabidopsis thaliana
cttcctctttgtttacc

SEQ ID NO: 177244 - DNA, 17 bp, Arabidopsis thaliana
cttcctggcttggtgaa

SEQ ID NO: 177245 - DNA, 17 bp, Arabidopsis thaliana
cttccttcacaaatgca

SEQ ID NO: 177246 - DNA, 17 bp, Arabidopsis thaliana
cttccttgtgattttca

SEQ ID NO: 177247 - DNA, 17 bp, Arabidopsis thaliana
cttcgacatgaccatcg

SEQ ID NO: 177248 - DNA, 17 bp, Arabidopsis thaliana
cttcgacgagtctacag

SEQ ID NO: 177249 - DNA, 17 bp, Arabidopsis thaliana
cttcgatgtcggctcct

SEQ ID NO: 177250 - DNA, 17 bp, Arabidopsis thaliana
cttcgatgtcggctctt

SEQ ID NO: 177251 - DNA, 17 bp, Arabidopsis thaliana
cttcgcaggagagatag

SEQ ID NO: 177252 - DNA, 17 bp, Arabidopsis thaliana
cttcgcttaacacacaa

SEQ ID NO: 177253 - DNA, 17 bp, Arabidopsis thaliana
cttcgcttaacacacac

SEQ ID NO: 177254 - DNA, 17 bp, Arabidopsis thaliana
cttcggaagcaggcggc

SEQ ID NO: 177255 - DNA, 17 bp, Arabidopsis thaliana
cttcggcgggtcgatcc

SEQ ID NO: 177256 - DNA, 17 bp, Arabidopsis thaliana
cttcgggaaaaggattg

SEQ ID NO: 177257 - DNA, 17 bp, Arabidopsis thaliana
cttcgggaacgtggctc

SEQ ID NO: 177258 - DNA, 17 bp, Arabidopsis thaliana
cttcgggatcggagtaa

SEQ ID NO: 177259 - DNA, 17 bp, Arabidopsis thaliana
cttcgggcaaaagatga

SEQ ID NO: 177260 - DNA, 17 bp, Arabidopsis thaliana
cttcggtcggcgatacg

SEQ ID NO: 177261 - DNA, 17 bp, Arabidopsis thaliana
cttcggttacattgtga

SEQ ID NO: 177262 - DNA, 17 bp, Arabidopsis thaliana
cttcgtcgcatcctgag

SEQ ID NO: 177263 - DNA, 17 bp, Arabidopsis thaliana
cttcgtcgcatcctgta

SEQ ID NO: 177264 - DNA, 17 bp, Arabidopsis thaliana
cttcgttggcgacaaca

SEQ ID NO: 177265 - DNA, 17 bp, Arabidopsis thaliana
cttcgttgtctgttcga

SEQ ID NO: 177266 - DNA, 17 bp, Arabidopsis thaliana
cttctaactctgaggca

SEQ ID NO: 177267 - DNA, 17 bp, Arabidopsis thaliana
cttctacaggatgcgat

SEQ ID NO: 177268 - DNA, 17 bp, Arabidopsis thaliana
cttctaccgcaagagtt

SEQ ID NO: 177269 - DNA, 17 bp, Arabidopsis thaliana
cttctagagggaaaacc

SEQ ID NO: 177270 - DNA, 17 bp, Arabidopsis thaliana
cttctagagggtaaacc

SEQ ID NO: 177271 - DNA, 17 bp, Arabidopsis thaliana
cttctagagtgggggag

SEQ ID NO: 177272 - DNA, 17 bp, Arabidopsis thaliana
cttctcatcgatggtct

SEQ ID NO: 177273 - DNA, 17 bp, Arabidopsis thaliana
cttctcctccgccccac

SEQ ID NO: 177274 - DNA, 17 bp, Arabidopsis thaliana
cttctcctccgcccccc

SEQ ID NO: 177275 - DNA, 17 bp, Arabidopsis thaliana
cttctcgagatacataa

SEQ ID NO: 177276 - DNA, 17 bp, Arabidopsis thaliana
cttctcgtcgaggatat

SEQ ID NO: 177277 - DNA, 17 bp, Arabidopsis thaliana
cttctctaagaagccaa

SEQ ID NO: 177278 - DNA, 17 bp, Arabidopsis thaliana
cttctctgcgtttgcca

SEQ ID NO: 177279 - DNA, 17 bp, Arabidopsis thaliana
cttctggtttttgctgc

SEQ ID NO: 177280 - DNA, 17 bp, Arabidopsis thaliana
cttctgtaatcttgagg

SEQ ID NO: 177281 - DNA, 17 bp, Arabidopsis thaliana
cttcttagagggactat

SEQ ID NO: 177282 - DNA, 17 bp, Arabidopsis thaliana
cttcttcctttcccttt

SEQ ID NO: 177283 - DNA, 17 bp, Arabidopsis thaliana
cttcttcgctacacctc

SEQ ID NO: 177284 - DNA, 17 bp, Arabidopsis thaliana
cttcttctgtaatcttg

SEQ ID NO: 177285 - DNA, 17 bp, Arabidopsis thaliana
cttcttctttgtttacc

SEQ ID NO: 177286 - DNA, 17 bp, Arabidopsis thaliana
cttcttggaccggttgg

SEQ ID NO: 177287 - DNA, 17 bp, Arabidopsis thaliana
cttcttggataaagaca

SEQ ID NO: 177288 - DNA, 17 bp, Arabidopsis thaliana
cttctttcaggcgaaga

SEQ ID NO: 177289 - DNA, 17 bp, Arabidopsis thaliana
cttctttctccaccatt

SEQ ID NO: 177290 - DNA, 17 bp, Arabidopsis thaliana
cttctttcttttcgttt

SEQ ID NO: 177291 - DNA, 17 bp, Arabidopsis thaliana
cttgaaaatctcattta

SEQ ID NO: 177292 - DNA, 17 bp, Arabidopsis thaliana
cttgaaagtgactacat

SEQ ID NO: 177293 - DNA, 17 bp, Arabidopsis thaliana
cttgaacttgtgtatgt

SEQ ID NO: 177294 - DNA, 17 bp, Arabidopsis thaliana
cttgaacttgtgtattt

SEQ ID NO: 177295 - DNA, 17 bp, Arabidopsis thaliana
cttgaagtcttcaggca

SEQ ID NO: 177296 - DNA, 17 bp, Arabidopsis thaliana
cttgacacatccatcac

SEQ ID NO: 177297 - DNA, 17 bp, Arabidopsis thaliana
cttgagcagttgatcgg

SEQ ID NO: 177298 - DNA, 17 bp, Arabidopsis thaliana
cttgagccgtgccaata

SEQ ID NO: 177299 - DNA, 17 bp, Arabidopsis thaliana
cttgaggtccctactga

SEQ ID NO: 177300 - DNA, 17 bp, Arabidopsis thaliana
cttgatcgagataacga

SEQ ID NO: 177301 - DNA, 17 bp, Arabidopsis thaliana
cttgatctacctgattc

SEQ ID NO: 177302 - DNA, 17 bp, Arabidopsis thaliana
cttgatcttgcatttta

SEQ ID NO: 177303 - DNA, 17 bp, Arabidopsis thaliana
cttgatgattcgacaaa

SEQ ID NO: 177304 - DNA, 17 bp, Arabidopsis thaliana
cttgatgtctagcagtg

SEQ ID NO: 177305 - DNA, 17 bp, Arabidopsis thaliana
cttgattaacgggcatt

SEQ ID NO: 177306 - DNA, 17 bp, Arabidopsis thaliana
cttgattctatgggtgg

SEQ ID NO: 177307 - DNA, 17 bp, Arabidopsis thaliana
cttgcacatgggttagt

SEQ ID NO: 177308 - DNA, 17 bp, Arabidopsis thaliana
cttgcgagagaagccaa

SEQ ID NO: 177309 - DNA, 17 bp, Arabidopsis thaliana
cttgcgggagaagccaa

SEQ ID NO: 177310 - DNA, 17 bp, Arabidopsis thaliana
cttgctacggactgacc

SEQ ID NO: 177311 - DNA, 17 bp, Arabidopsis thaliana
cttgctgccacgatcca

SEQ ID NO: 177312 - DNA, 17 bp, Arabidopsis thaliana
cttgcttcatgtagact

SEQ ID NO: 177313 - DNA, 17 bp, Arabidopsis thaliana
cttgcttgcagagagaa

SEQ ID NO: 177314 - DNA, 17 bp, Arabidopsis thaliana
cttggaacacggaccaa

SEQ ID NO: 177315 - DNA, 17 bp, Arabidopsis thaliana
cttggacctcctcgacg

SEQ ID NO: 177316 - DNA, 17 bp, Arabidopsis thaliana
cttggagacctgatgcg

SEQ ID NO: 177317 - DNA, 17 bp, Arabidopsis thaliana
cttggataaagacattg

SEQ ID NO: 177318 - DNA, 17 bp, Arabidopsis thaliana
cttggctcaggcggttc

SEQ ID NO: 177319 - DNA, 17 bp, Arabidopsis thaliana
cttggctcggatttagg

SEQ ID NO: 177320 - DNA, 17 bp, Arabidopsis thaliana
cttgggaccaaaaacga

SEQ ID NO: 177321 - DNA, 17 bp, Arabidopsis thaliana
cttgggatgggtcggcc

SEQ ID NO: 177322 - DNA, 17 bp, Arabidopsis thaliana
cttgggatgggtcggtg

SEQ ID NO: 177323 - DNA, 17 bp, Arabidopsis thaliana
cttgggcgagagtagta

SEQ ID NO: 177324 - DNA, 17 bp, Arabidopsis thaliana
cttggggatgggtcttt

SEQ ID NO: 177325 - DNA, 17 bp, Arabidopsis thaliana
cttgggtatcaataggg

SEQ ID NO: 177326 - DNA, 17 bp, Arabidopsis thaliana
cttgggtgaaactaagt

SEQ ID NO: 177327 - DNA, 17 bp, Arabidopsis thaliana
cttggtatgggacggta

SEQ ID NO: 177328 - DNA, 17 bp, Arabidopsis thaliana
cttggtcgcatcctgta

SEQ ID NO: 177329 - DNA, 17 bp, Arabidopsis thaliana
cttggtgaagaaaacgc

SEQ ID NO: 177330 - DNA, 17 bp, Arabidopsis thaliana
cttggtgcaggtcggga

SEQ ID NO: 177331 - DNA, 17 bp, Arabidopsis thaliana
cttggttgcgatggatt

SEQ ID NO: 177332 - DNA, 17 bp, Arabidopsis thaliana
cttgtaagaccccatct

SEQ ID NO: 177333 - DNA, 17 bp, Arabidopsis thaliana
cttgtaaggccttttct

SEQ ID NO: 177334 - DNA, 17 bp, Arabidopsis thaliana
cttgtcagggcaagatt

SEQ ID NO: 177335 - DNA, 17 bp, Arabidopsis thaliana
cttgtcccttcggtcgg

SEQ ID NO: 177336 - DNA, 17 bp, Arabidopsis thaliana
cttgtcgcatccgtaga

SEQ ID NO: 177337 - DNA, 17 bp, Arabidopsis thaliana
cttgtcgcatcctgtag

SEQ ID NO: 177338 - DNA, 17 bp, Arabidopsis thaliana
cttgtctacaattttgg

SEQ ID NO: 177339 - DNA, 17 bp, Arabidopsis thaliana
cttgtctcaaagattaa

SEQ ID NO: 177340 - DNA, 17 bp, Arabidopsis thaliana
cttgtctcaggtggctc

SEQ ID NO: 177341 - DNA, 17 bp, Arabidopsis thaliana
cttgtgaccagacttgc

SEQ ID NO: 177342 - DNA, 17 bp, Arabidopsis thaliana
cttgtggactgcttggt

SEQ ID NO: 177343 - DNA, 17 bp, Arabidopsis thaliana
cttgtggcagccaagca

SEQ ID NO: 177344 - DNA, 17 bp, Arabidopsis thaliana
cttgtggcagccaagcg

SEQ ID NO: 177345 - DNA, 17 bp, Arabidopsis thaliana
cttgtgtcaggacctac

SEQ ID NO: 177346 - DNA, 17 bp, Arabidopsis thaliana
cttgttagtttggttag

SEQ ID NO: 177347 - DNA, 17 bp, Arabidopsis thaliana
cttgttcctacatgacc

SEQ ID NO: 177348 - DNA, 17 bp, Arabidopsis thaliana
ctttaccaacctttcat

SEQ ID NO: 177349 - DNA, 17 bp, Arabidopsis thaliana
ctttaccgacgatacca

SEQ ID NO: 177350 - DNA, 17 bp, Arabidopsis thaliana
ctttaccgttaatcgag

SEQ ID NO: 177351 - DNA, 17 bp, Arabidopsis thaliana
ctttagaagccgtttga

SEQ ID NO: 177352 - DNA, 17 bp, Arabidopsis thaliana
ctttagacaaaggtgct

SEQ ID NO: 177353 - DNA, 17 bp, Arabidopsis thaliana
ctttagaccttcggaat

SEQ ID NO: 177354 - DNA, 17 bp, Arabidopsis thaliana
ctttagacgacttgaaa

SEQ ID NO: 177355 - DNA, 17 bp, Arabidopsis thaliana
ctttagcagccgtttga

SEQ ID NO: 177356 - DNA, 17 bp, Arabidopsis thaliana
ctttagctcttgctcaa

SEQ ID NO: 177357 - DNA, 17 bp, Arabidopsis thaliana
ctttagcttcgcgagtc

SEQ ID NO: 177358 - DNA, 17 bp, Arabidopsis thaliana
ctttagtcgcatcctgt

SEQ ID NO: 177359 - DNA, 17 bp, Arabidopsis thaliana
ctttatatccgcatttg

SEQ ID NO: 177360 - DNA, 17 bp, Arabidopsis thaliana
ctttatcatccttctgg

SEQ ID NO: 177361 - DNA, 17 bp, Arabidopsis thaliana
ctttatctacaattttg

SEQ ID NO: 177362 - DNA, 17 bp, Arabidopsis thaliana
ctttattagtgagacgc

SEQ ID NO: 177363 - DNA, 17 bp, Arabidopsis thaliana
ctttatttttgaggaaa

SEQ ID NO: 177364 - DNA, 17 bp, Arabidopsis thaliana
ctttcacccaggagacc

SEQ ID NO: 177365 - DNA, 17 bp, Arabidopsis thaliana
ctttcagaggcgaaagg

SEQ ID NO: 177366 - DNA, 17 bp, Arabidopsis thaliana
ctttccactaagcaaat

SEQ ID NO: 177367 - DNA, 17 bp, Arabidopsis thaliana
ctttccactaagcagat

SEQ ID NO: 177368 - DNA, 17 bp, Arabidopsis thaliana
ctttccgctaagcagat

SEQ ID NO: 177369 - DNA, 17 bp, Arabidopsis thaliana
ctttcctaagggttgtg

SEQ ID NO: 177370 - DNA, 17 bp, Arabidopsis thaliana
ctttcgcgcaaaaccgt

SEQ ID NO: 177371 - DNA, 17 bp, Arabidopsis thaliana
ctttcggaccaggcttc

SEQ ID NO: 177372 - DNA, 17 bp, Arabidopsis thaliana
ctttcggcggcagggca

SEQ ID NO: 177373 - DNA, 17 bp, Arabidopsis thaliana
ctttcggttctctggat

SEQ ID NO: 177374 - DNA, 17 bp, Arabidopsis thaliana
ctttcgtccagtggtta

SEQ ID NO: 177375 - DNA, 17 bp, Arabidopsis thaliana
ctttctacattgtcaat

SEQ ID NO: 177376 - DNA, 17 bp, Arabidopsis thaliana
ctttctcatcgatggtc

SEQ ID NO: 177377 - DNA, 17 bp, Arabidopsis thaliana
ctttctgacaaagtcaa

SEQ ID NO: 177378 - DNA, 17 bp, Arabidopsis thaliana
ctttctggagaccaaac

SEQ ID NO: 177379 - DNA, 17 bp, Arabidopsis thaliana
ctttctgggtgttgctg

SEQ ID NO: 177380 - DNA, 17 bp, Arabidopsis thaliana
ctttcttatcttacagt

SEQ ID NO: 177381 - DNA, 17 bp, Arabidopsis thaliana
ctttcttgattctatgg

SEQ ID NO: 177382 - DNA, 17 bp, Arabidopsis thaliana
ctttcttggccattgga

SEQ ID NO: 177383 - DNA, 17 bp, Arabidopsis thaliana
ctttcttttcaggcttg

SEQ ID NO: 177384 - DNA, 17 bp, Arabidopsis thaliana
ctttgaagatagactta

SEQ ID NO: 177385 - DNA, 17 bp, Arabidopsis thaliana
ctttgagagatcaagtt

SEQ ID NO: 177386 - DNA, 17 bp, Arabidopsis thaliana
ctttgagttagttcctt

SEQ ID NO: 177387 - DNA, 17 bp, Arabidopsis thaliana
ctttgatttcccataag

SEQ ID NO: 177388 - DNA, 17 bp, Arabidopsis thaliana
ctttgcctgccaatagg

SEQ ID NO: 177389 - DNA, 17 bp, Arabidopsis thaliana
ctttgcggcaaatgtgt

SEQ ID NO: 177390 - DNA, 17 bp, Arabidopsis thaliana
ctttgctgatgcgggga

SEQ ID NO: 177391 - DNA, 17 bp, Arabidopsis thaliana
ctttggatcatctcctc

SEQ ID NO: 177392 - DNA, 17 bp, Arabidopsis thaliana
ctttggatgatatgatg

SEQ ID NO: 177393 - DNA, 17 bp, Arabidopsis thaliana
ctttggattgaagggag

SEQ ID NO: 177394 - DNA, 17 bp, Arabidopsis thaliana
ctttggcattctgtcca

SEQ ID NO: 177395 - DNA, 17 bp, Arabidopsis thaliana
ctttggctagtcactta

SEQ ID NO: 177396 - DNA, 17 bp, Arabidopsis thaliana
ctttggctagtcacttg

SEQ ID NO: 177397 - DNA, 17 bp, Arabidopsis thaliana
ctttggctgtagttctt

SEQ ID NO: 177398 - DNA, 17 bp, Arabidopsis thaliana
ctttgggagcctaagct

SEQ ID NO: 177399 - DNA, 17 bp, Arabidopsis thaliana
ctttggtgatccttcgg

SEQ ID NO: 177400 - DNA, 17 bp, Arabidopsis thaliana
ctttggtgtgcattggt

SEQ ID NO: 177401 - DNA, 17 bp, Arabidopsis thaliana
ctttgtaattacggaag

SEQ ID NO: 177402 - DNA, 17 bp, Arabidopsis thaliana
ctttgtacacaccgccc

SEQ ID NO: 177403 - DNA, 17 bp, Arabidopsis thaliana
ctttgtcgcatcctgta

SEQ ID NO: 177404 - DNA, 17 bp, Arabidopsis thaliana
ctttgtcgctaagaaag

SEQ ID NO: 177405 - DNA, 17 bp, Arabidopsis thaliana
ctttgtcgctaagattc

SEQ ID NO: 177406 - DNA, 17 bp, Arabidopsis thaliana
ctttgtctacaatttta

SEQ ID NO: 177407 - DNA, 17 bp, Arabidopsis thaliana
ctttgtctacaattttg

SEQ ID NO: 177408 - DNA, 17 bp, Arabidopsis thaliana
ctttgtctacacttttg

SEQ ID NO: 177409 - DNA, 17 bp, Arabidopsis thaliana
ctttgtctgctggatcc

SEQ ID NO: 177410 - DNA, 17 bp, Arabidopsis thaliana
ctttgtgtttaggcttt

SEQ ID NO: 177411 - DNA, 17 bp, Arabidopsis thaliana
ctttgttactggagaac

SEQ ID NO: 177412 - DNA, 17 bp, Arabidopsis thaliana
ctttgtttaccagtttg

SEQ ID NO: 177413 - DNA, 17 bp, Arabidopsis thaliana
cttttaacagatgtgcc

SEQ ID NO: 177414 - DNA, 17 bp, Arabidopsis thaliana
cttttcaaaactggtac

SEQ ID NO: 177415 - DNA, 17 bp, Arabidopsis thaliana
cttttcaaaactggttc

SEQ ID NO: 177416 - DNA, 17 bp, Arabidopsis thaliana
cttttcaaccaagcgcg

SEQ ID NO: 177417 - DNA, 17 bp, Arabidopsis thaliana
cttttcaggaatctaac

SEQ ID NO: 177418 - DNA, 17 bp, Arabidopsis thaliana
cttttcccacaaactta

SEQ ID NO: 177419 - DNA, 17 bp, Arabidopsis thaliana
cttttcccacaaacttg

SEQ ID NO: 177420 - DNA, 17 bp, Arabidopsis thaliana
cttttctactttttcta

SEQ ID NO: 177421 - DNA, 17 bp, Arabidopsis thaliana
cttttctctaccaagga

SEQ ID NO: 177422 - DNA, 17 bp, Arabidopsis thaliana
cttttctctactctttt

SEQ ID NO: 177423 - DNA, 17 bp, Arabidopsis thaliana
cttttcttgaccttgta

SEQ ID NO: 177424 - DNA, 17 bp, Arabidopsis thaliana
cttttgaccggttagcc

SEQ ID NO: 177425 - DNA, 17 bp, Arabidopsis thaliana
cttttgcatccactgag

SEQ ID NO: 177426 - DNA, 17 bp, Arabidopsis thaliana
cttttgcatgatgggtc

SEQ ID NO: 177427 - DNA, 17 bp, Arabidopsis thaliana
cttttgtcggaagattc

SEQ ID NO: 177428 - DNA, 17 bp, Arabidopsis thaliana
cttttgtggactatgaa

SEQ ID NO: 177429 - DNA, 17 bp, Arabidopsis thaliana
cttttgtgggctatgaa

SEQ ID NO: 177430 - DNA, 17 bp, Arabidopsis thaliana
ctttttattacccgcag

SEQ ID NO: 177431 - DNA, 17 bp, Arabidopsis thaliana
ctttttctactatcctg

SEQ ID NO: 177432 - DNA, 17 bp, Arabidopsis thaliana
cttttttgtagacgttg

SEQ ID NO: 177433 - DNA, 17 bp, Arabidopsis thaliana
ctttttttacggggata

SEQ ID NO: 177434 - DNA, 17 bp, Arabidopsis thaliana
ctttttttccttttttt

SEQ ID NO: 177435 - DNA, 17 bp, Arabidopsis thaliana
ctttttttctcaggcgg

SEQ ID NO: 177436 - DNA, 17 bp, Arabidopsis thaliana
ctttttttcttttgaca

SEQ ID NO: 177437 - DNA, 17 bp, Arabidopsis thaliana
ctttttttttcttttta

SEQ ID NO: 177438 - DNA, 17 bp, Arabidopsis thaliana
gaaaaaaaaagagttgc

SEQ ID NO: 177439 - DNA, 17 bp, Arabidopsis thaliana
gaaaaaaaaagtattga

SEQ ID NO: 177440 - DNA, 17 bp, Arabidopsis thaliana
gaaaaaaaaatcagaca

SEQ ID NO: 177441 - DNA, 17 bp, Arabidopsis thaliana
gaaaaaatccactttgt

SEQ ID NO: 177442 - DNA, 17 bp, Arabidopsis thaliana
gaaaaaatccgactaaa

SEQ ID NO: 177443 - DNA, 17 bp, Arabidopsis thaliana
gaaaaaggcaacaaaac

SEQ ID NO: 177444 - DNA, 17 bp, Arabidopsis thaliana
gaaaaatatctggaggt

SEQ ID NO: 177445 - DNA, 17 bp, Arabidopsis thaliana
gaaaacaaaatccccaa

SEQ ID NO: 177446 - DNA, 17 bp, Arabidopsis thaliana
gaaaacgtgaccgagtt

SEQ ID NO: 177447 - DNA, 17 bp, Arabidopsis thaliana
gaaaaggattggctctg

SEQ ID NO: 177448 - DNA, 17 bp, Arabidopsis thaliana
gaaaaggtttttcttag

SEQ ID NO: 177449 - DNA, 17 bp, Arabidopsis thaliana
gaaaataagtctctgtg

SEQ ID NO: 177450 - DNA, 17 bp, Arabidopsis thaliana
gaaaatagaggctgata

SEQ ID NO: 177451 - DNA, 17 bp, Arabidopsis thaliana
gaaaccaacagggattg

SEQ ID NO: 177452 - DNA, 17 bp, Arabidopsis thaliana
gaaaccacggatccggc

SEQ ID NO: 177453 - DNA, 17 bp, Arabidopsis thaliana
gaaaccgccttccgact

SEQ ID NO: 177454 - DNA, 17 bp, Arabidopsis thaliana
gaaacgaaacacacaca

SEQ ID NO: 177455 - DNA, 17 bp, Arabidopsis thaliana
gaaactaaaattcgttg

SEQ ID NO: 177456 - DNA, 17 bp, Arabidopsis thaliana
gaaactgcgaatggctc

SEQ ID NO: 177457 - DNA, 17 bp, Arabidopsis thaliana
gaaacttagcgacaaag

SEQ ID NO: 177458 - DNA, 17 bp, Arabidopsis thaliana
gaaagaccctatgaagc

SEQ ID NO: 177459 - DNA, 17 bp, Arabidopsis thaliana
gaaagcatttgccaagg

SEQ ID NO: 177460 - DNA, 17 bp, Arabidopsis thaliana
gaaagggacctgtcaga

SEQ ID NO: 177461 - DNA, 17 bp, Arabidopsis thaliana
gaaagtcaaggctgata

SEQ ID NO: 177462 - DNA, 17 bp, Arabidopsis thaliana
gaaagtcaaggctgatt

SEQ ID NO: 177463 - DNA, 17 bp, Arabidopsis thaliana
gaaagttgaccttggct

SEQ ID NO: 177464 - DNA, 17 bp, Arabidopsis thaliana
gaaataggagtggcaca

SEQ ID NO: 177465 - DNA, 17 bp, Arabidopsis thaliana
gaaataggagtggcacc

SEQ ID NO: 177466 - DNA, 17 bp, Arabidopsis thaliana
gaaatcagttttcttaa

SEQ ID NO: 177467 - DNA, 17 bp, Arabidopsis thaliana
gaaatccgctaaggagt

SEQ ID NO: 177468 - DNA, 17 bp, Arabidopsis thaliana
gaaatctccaattgttc

SEQ ID NO: 177469 - DNA, 17 bp, Arabidopsis thaliana
gaaatcttgatgatgct

SEQ ID NO: 177470 - DNA, 17 bp, Arabidopsis thaliana
gaaatgacttgagaggt

SEQ ID NO: 177471 - DNA, 17 bp, Arabidopsis thaliana
gaaatgtttttctactt

SEQ ID NO: 177472 - DNA, 17 bp, Arabidopsis thaliana
gaaatttcatcgcgatg

SEQ ID NO: 177473 - DNA, 17 bp, Arabidopsis thaliana
gaaatttcatcgtgatg

SEQ ID NO: 177474 - DNA, 17 bp, Arabidopsis thaliana
gaacagacaacgaaaca

SEQ ID NO: 177475 - DNA, 17 bp, Arabidopsis thaliana
gaacagacaacgaaaga

SEQ ID NO: 177476 - DNA, 17 bp, Arabidopsis thaliana
gaacagacaacgaaagt

SEQ ID NO: 177477 - DNA, 17 bp, Arabidopsis thaliana
gaacagacaacgaagaa

SEQ ID NO: 177478 - DNA, 17 bp, Arabidopsis thaliana
gaacagacaacgaagat

SEQ ID NO: 177479 - DNA, 17 bp, Arabidopsis thaliana
gaacagagaacgaaaga

SEQ ID NO: 177480 - DNA, 17 bp, Arabidopsis thaliana
gaacagagaatctgcca

SEQ ID NO: 177481 - DNA, 17 bp, Arabidopsis thaliana
gaacagagtggttggac

SEQ ID NO: 177482 - DNA, 17 bp, Arabidopsis thaliana
gaaccacccacgtcgcc

SEQ ID NO: 177483 - DNA, 17 bp, Arabidopsis thaliana
gaaccagttttgaaaag

SEQ ID NO: 177484 - DNA, 17 bp, Arabidopsis thaliana
gaaccatcgagtctttg

SEQ ID NO: 177485 - DNA, 17 bp, Arabidopsis thaliana
gaaccatgaccgtgcga

SEQ ID NO: 177486 - DNA, 17 bp, Arabidopsis thaliana
gaaccatgaccgtgcgg

SEQ ID NO: 177487 - DNA, 17 bp, Arabidopsis thaliana
gaacccgggcgaagcca

SEQ ID NO: 177488 - DNA, 17 bp, Arabidopsis thaliana
gaacccgggctcagaca

SEQ ID NO: 177489 - DNA, 17 bp, Arabidopsis thaliana
gaacccgggtcacccgc

SEQ ID NO: 177490 - DNA, 17 bp, Arabidopsis thaliana
gaaccctgcagctgtcg

SEQ ID NO: 177491 - DNA, 17 bp, Arabidopsis thaliana
gaacccttggagagtgt

SEQ ID NO: 177492 - DNA, 17 bp, Arabidopsis thaliana
gaaccgacccgaggaac

SEQ ID NO: 177493 - DNA, 17 bp, Arabidopsis thaliana
gaacctgcggaaggatc

SEQ ID NO: 177494 - DNA, 17 bp, Arabidopsis thaliana
gaacctgcggagggatc

SEQ ID NO: 177495 - DNA, 17 bp, Arabidopsis thaliana
gaacctgcgggaggatc

SEQ ID NO: 177496 - DNA, 17 bp, Arabidopsis thaliana
gaaccttatgaaaaaaa

SEQ ID NO: 177497 - DNA, 17 bp, Arabidopsis thaliana
gaaccttgggatgggtc

SEQ ID NO: 177498 - DNA, 17 bp, Arabidopsis thaliana
gaacgacgcttccgccg

SEQ ID NO: 177499 - DNA, 17 bp, Arabidopsis thaliana
gaacgctatgttggact

SEQ ID NO: 177500 - DNA, 17 bp, Arabidopsis thaliana
gaacgcttcaccggatc

SEQ ID NO: 177501 - DNA, 17 bp, Arabidopsis thaliana
gaactatgactattcat

SEQ ID NO: 177502 - DNA, 17 bp, Arabidopsis thaliana
gaactcagaatacgcta

SEQ ID NO: 177503 - DNA, 17 bp, Arabidopsis thaliana
gaactcagccccttgca

SEQ ID NO: 177504 - DNA, 17 bp, Arabidopsis thaliana
gaactcatctttggtgt

SEQ ID NO: 177505 - DNA, 17 bp, Arabidopsis thaliana
gaactgaagtccaagca

SEQ ID NO: 177506 - DNA, 17 bp, Arabidopsis thaliana
gaactggcgatgcggga

SEQ ID NO: 177507 - DNA, 17 bp, Arabidopsis thaliana
gaactgtaccagtcatg

SEQ ID NO: 177508 - DNA, 17 bp, Arabidopsis thaliana
gaacttagaatacgcta

SEQ ID NO: 177509 - DNA, 17 bp, Arabidopsis thaliana
gaacttattggcctttt

SEQ ID NO: 177510 - DNA, 17 bp, Arabidopsis thaliana
gaacttttttgtagacg

SEQ ID NO: 177511 - DNA, 17 bp, Arabidopsis thaliana
gaagaaaactttctgga

SEQ ID NO: 177512 - DNA, 17 bp, Arabidopsis thaliana
gaagaagacgggaagga

SEQ ID NO: 177513 - DNA, 17 bp, Arabidopsis thaliana
gaagacagtccttgcta

SEQ ID NO: 177514 - DNA, 17 bp, Arabidopsis thaliana
gaagacgcgggttcgat

SEQ ID NO: 177515 - DNA, 17 bp, Arabidopsis thaliana
gaagacttggtgtgaag

SEQ ID NO: 177516 - DNA, 17 bp, Arabidopsis thaliana
gaagagaaggagctcgt

SEQ ID NO: 177517 - DNA, 17 bp, Arabidopsis thaliana
gaagagcaccgcacgtc

SEQ ID NO: 177518 - DNA, 17 bp, Arabidopsis thaliana
gaagaggacttggaact

SEQ ID NO: 177519 - DNA, 17 bp, Arabidopsis thaliana
gaagagtaagatggatc

SEQ ID NO: 177520 - DNA, 17 bp, Arabidopsis thaliana
gaagagtctaagcaggt

SEQ ID NO: 177521 - DNA, 17 bp, Arabidopsis thaliana
gaagatggagtgatgca

SEQ ID NO: 177522 - DNA, 17 bp, Arabidopsis thaliana
gaagattagcatggccc

SEQ ID NO: 177523 - DNA, 17 bp, Arabidopsis thaliana
gaagcagactgccatcc

SEQ ID NO: 177524 - DNA, 17 bp, Arabidopsis thaliana
gaagcagccatggaagc

SEQ ID NO: 177525 - DNA, 17 bp, Arabidopsis thaliana
gaagcagggcacgtgca

SEQ ID NO: 177526 - DNA, 17 bp, Arabidopsis thaliana
gaagcatattgatgtgc

SEQ ID NO: 177527 - DNA, 17 bp, Arabidopsis thaliana
gaagccggttccaagac

SEQ ID NO: 177528 - DNA, 17 bp, Arabidopsis thaliana
gaagcctccgtgacagc

SEQ ID NO: 177529 - DNA, 17 bp, Arabidopsis thaliana
gaagcgacgcatgcgcc

SEQ ID NO: 177530 - DNA, 17 bp, Arabidopsis thaliana
gaagcggatgggggccg

SEQ ID NO: 177531 - DNA, 17 bp, Arabidopsis thaliana
gaagcgtcgttcggacc

SEQ ID NO: 177532 - DNA, 17 bp, Arabidopsis thaliana
gaagcgttgttcggacc

SEQ ID NO: 177533 - DNA, 17 bp, Arabidopsis thaliana
gaagctcaggagggata

SEQ ID NO: 177534 - DNA, 17 bp, Arabidopsis thaliana
gaagcttcagaagcagt

SEQ ID NO: 177535 - DNA, 17 bp, Arabidopsis thaliana
gaagcttctcggtagcg

SEQ ID NO: 177536 - DNA, 17 bp, Arabidopsis thaliana
gaaggatcattgtcgat

SEQ ID NO: 177537 - DNA, 17 bp, Arabidopsis thaliana
gaaggatctaagtcatc

SEQ ID NO: 177538 - DNA, 17 bp, Arabidopsis thaliana
gaaggctgcttagagga

SEQ ID NO: 177539 - DNA, 17 bp, Arabidopsis thaliana
gaaggctttctgcgttc

SEQ ID NO: 177540 - DNA, 17 bp, Arabidopsis thaliana
gaagggcttgccaacga

SEQ ID NO: 177541 - DNA, 17 bp, Arabidopsis thaliana
gaaggtcgcgattctac

SEQ ID NO: 177542 - DNA, 17 bp, Arabidopsis thaliana
gaaggtcgcgattcttc

SEQ ID NO: 177543 - DNA, 17 bp, Arabidopsis thaliana
gaaggtcgcgtgttcgt

SEQ ID NO: 177544 - DNA, 17 bp, Arabidopsis thaliana
gaaggtgaggatgacga

SEQ ID NO: 177545 - DNA, 17 bp, Arabidopsis thaliana
gaaggtgcggctggata

SEQ ID NO: 177546 - DNA, 17 bp, Arabidopsis thaliana
gaagtaacactcggtgg

SEQ ID NO: 177547 - DNA, 17 bp, Arabidopsis thaliana
gaagtaggggctggagg

SEQ ID NO: 177548 - DNA, 17 bp, Arabidopsis thaliana
gaagtcctcgtgttgca

SEQ ID NO: 177549 - DNA, 17 bp, Arabidopsis thaliana
gaagtgttcggatcgcg

SEQ ID NO: 177550 - DNA, 17 bp, Arabidopsis thaliana
gaagttccaagtcctct

SEQ ID NO: 177551 - DNA, 17 bp, Arabidopsis thaliana
gaagttccgttcttgaa

SEQ ID NO: 177552 - DNA, 17 bp, Arabidopsis thaliana
gaagttcttgcagcgtt

SEQ ID NO: 177553 - DNA, 17 bp, Arabidopsis thaliana
gaagttgattggttaag

SEQ ID NO: 177554 - DNA, 17 bp, Arabidopsis thaliana
gaagtttccctcaggat

SEQ ID NO: 177555 - DNA, 17 bp, Arabidopsis thaliana
gaataccgggggttcga

SEQ ID NO: 177556 - DNA, 17 bp, Arabidopsis thaliana
gaatacttgaactacca

SEQ ID NO: 177557 - DNA, 17 bp, Arabidopsis thaliana
gaatagttcgctttgtg

SEQ ID NO: 177558 - DNA, 17 bp, Arabidopsis thaliana
gaatatgctatgttgga

SEQ ID NO: 177559 - DNA, 17 bp, Arabidopsis thaliana
gaatcaacggttcctct

SEQ ID NO: 177560 - DNA, 17 bp, Arabidopsis thaliana
gaatccgggctagaagc

SEQ ID NO: 177561 - DNA, 17 bp, Arabidopsis thaliana
gaatcctttgcagacga

SEQ ID NO: 177562 - DNA, 17 bp, Arabidopsis thaliana
gaatcgccgaccgggtc

SEQ ID NO: 177563 - DNA, 17 bp, Arabidopsis thaliana
gaatctagtaacccgag

SEQ ID NO: 177564 - DNA, 17 bp, Arabidopsis thaliana
gaatctcatttcttttg

SEQ ID NO: 177565 - DNA, 17 bp, Arabidopsis thaliana
gaatcttagcgacaaag

SEQ ID NO: 177566 - DNA, 17 bp, Arabidopsis thaliana
gaatcttccgacaaaag

SEQ ID NO: 177567 - DNA, 17 bp, Arabidopsis thaliana
gaatcttgatgatgcag

SEQ ID NO: 177568 - DNA, 17 bp, Arabidopsis thaliana
gaatcttgatgatgcca

SEQ ID NO: 177569 - DNA, 17 bp, Arabidopsis thaliana
gaatcttgatgatgcta

SEQ ID NO: 177570 - DNA, 17 bp, Arabidopsis thaliana
gaatcttgatgatgctg

SEQ ID NO: 177571 - DNA, 17 bp, Arabidopsis thaliana
gaatcttgatgatgctt

SEQ ID NO: 177572 - DNA, 17 bp, Arabidopsis thaliana
gaatcttgatgttgctg

SEQ ID NO: 177573 - DNA, 17 bp, Arabidopsis thaliana
gaatggacttgatctac

SEQ ID NO: 177574 - DNA, 17 bp, Arabidopsis thaliana
gaatggggttttcctta

SEQ ID NO: 177575 - DNA, 17 bp, Arabidopsis thaliana
gaatggtaatgatttga

SEQ ID NO: 177576 - DNA, 17 bp, Arabidopsis thaliana
gaatggtaatgatttgt

SEQ ID NO: 177577 - DNA, 17 bp, Arabidopsis thaliana
gaatggtgtcttctgtg

SEQ ID NO: 177578 - DNA, 17 bp, Arabidopsis thaliana
gaatgtgacgaaagtag

SEQ ID NO: 177579 - DNA, 17 bp, Arabidopsis thaliana
gaatgtggtagatgcaa

SEQ ID NO: 177580 - DNA, 17 bp, Arabidopsis thaliana
gaatgttgtctggatcg

SEQ ID NO: 177581 - DNA, 17 bp, Arabidopsis thaliana
gaattgacatatattga

SEQ ID NO: 177582 - DNA, 17 bp, Arabidopsis thaliana
gaattgacggaagggca

SEQ ID NO: 177583 - DNA, 17 bp, Arabidopsis thaliana
gaattgccgtgatcgat

SEQ ID NO: 177584 - DNA, 17 bp, Arabidopsis thaliana
gaattggattgagcctt

SEQ ID NO: 177585 - DNA, 17 bp, Arabidopsis thaliana
gaattgtcgtccgtcga

SEQ ID NO: 177586 - DNA, 17 bp, Arabidopsis thaliana
gaattttgtctagtatc

SEQ ID NO: 177587 - DNA, 17 bp, Arabidopsis thaliana
gacaaaatacatgcgca

SEQ ID NO: 177588 - DNA, 17 bp, Arabidopsis thaliana
gacaaagggtcgcgatc

SEQ ID NO: 177589 - DNA, 17 bp, Arabidopsis thaliana
gacaactgggtggtcga

SEQ ID NO: 177590 - DNA, 17 bp, Arabidopsis thaliana
gacaatatttgcacagg

SEQ ID NO: 177591 - DNA, 17 bp, Arabidopsis thaliana
gacaatcctgcgggtaa

SEQ ID NO: 177592 - DNA, 17 bp, Arabidopsis thaliana
gacaatctttgctaacc

SEQ ID NO: 177593 - DNA, 17 bp, Arabidopsis thaliana
gacactagtgggccatt

SEQ ID NO: 177594 - DNA, 17 bp, Arabidopsis thaliana
gacactgctatcctgag

SEQ ID NO: 177595 - DNA, 17 bp, Arabidopsis thaliana
gacactttggccgagta

SEQ ID NO: 177596 - DNA, 17 bp, Arabidopsis thaliana
gacactttggccgagtg

SEQ ID NO: 177597 - DNA, 17 bp, Arabidopsis thaliana
gacagcgacgggattga

SEQ ID NO: 177598 - DNA, 17 bp, Arabidopsis thaliana
gacaggccgattggtca

SEQ ID NO: 177599 - DNA, 17 bp, Arabidopsis thaliana
gacagggtccgggcacg

SEQ ID NO: 177600 - DNA, 17 bp, Arabidopsis thaliana
gacagtttggccgagtg

SEQ ID NO: 177601 - DNA, 17 bp, Arabidopsis thaliana
gacataatcgtacatgc

SEQ ID NO: 177602 - DNA, 17 bp, Arabidopsis thaliana
gacattcagagcactgg

SEQ ID NO: 177603 - DNA, 17 bp, Arabidopsis thaliana
gacattggacatattcc

SEQ ID NO: 177604 - DNA, 17 bp, Arabidopsis thaliana
gaccaatgcacaccaaa

SEQ ID NO: 177605 - DNA, 17 bp, Arabidopsis thaliana
gaccacgggatgttggg

SEQ ID NO: 177606 - DNA, 17 bp, Arabidopsis thaliana
gaccagacttgcgccgg

SEQ ID NO: 177607 - DNA, 17 bp, Arabidopsis thaliana
gaccatttgagctgcag

SEQ ID NO: 177608 - DNA, 17 bp, Arabidopsis thaliana
gacccatcccaaggttc

SEQ ID NO: 177609 - DNA, 17 bp, Arabidopsis thaliana
gacccgaaagatggtga

SEQ ID NO: 177610 - DNA, 17 bp, Arabidopsis thaliana
gacccgcaccaagcgag

SEQ ID NO: 177611 - DNA, 17 bp, Arabidopsis thaliana
gaccctcagtaggagct

SEQ ID NO: 177612 - DNA, 17 bp, Arabidopsis thaliana
gaccctgtcgcaccacg

SEQ ID NO: 177613 - DNA, 17 bp, Arabidopsis thaliana
gaccctgttgggcttga

SEQ ID NO: 177614 - DNA, 17 bp, Arabidopsis thaliana
gaccgaagggacaagcc

SEQ ID NO: 177615 - DNA, 17 bp, Arabidopsis thaliana
gaccgaaggggattcca

SEQ ID NO: 177616 - DNA, 17 bp, Arabidopsis thaliana
gaccgacgcagattacg

SEQ ID NO: 177617 - DNA, 17 bp, Arabidopsis thaliana
gaccgacgcgaattacg

SEQ ID NO: 177618 - DNA, 17 bp, Arabidopsis thaliana
gaccgacgcggattaca

SEQ ID NO: 177619 - DNA, 17 bp, Arabidopsis thaliana
gaccgacgcggattacg

SEQ ID NO: 177620 - DNA, 17 bp, Arabidopsis thaliana
gaccgcatagcgcagta

SEQ ID NO: 177621 - DNA, 17 bp, Arabidopsis thaliana
gaccgcatagcgcagtg

SEQ ID NO: 177622 - DNA, 17 bp, Arabidopsis thaliana
gaccgcatagcgcattg

SEQ ID NO: 177623 - DNA, 17 bp, Arabidopsis thaliana
gaccgccgtgagacagg

SEQ ID NO: 177624 - DNA, 17 bp, Arabidopsis thaliana
gaccgctacactgctta

SEQ ID NO: 177625 - DNA, 17 bp, Arabidopsis thaliana
gacctatgtttctacca

SEQ ID NO: 177626 - DNA, 17 bp, Arabidopsis thaliana
gacctcagcctgctaac

SEQ ID NO: 177627 - DNA, 17 bp, Arabidopsis thaliana
gacctcccgggaagtcc

SEQ ID NO: 177628 - DNA, 17 bp, Arabidopsis thaliana
gacctgcaccaagcgag

SEQ ID NO: 177629 - DNA, 17 bp, Arabidopsis thaliana
gacctgccggaaacgaa

SEQ ID NO: 177630 - DNA, 17 bp, Arabidopsis thaliana
gacctgcggaaggatca

SEQ ID NO: 177631 - DNA, 17 bp, Arabidopsis thaliana
gaccttaactcagtggt

SEQ ID NO: 177632 - DNA, 17 bp, Arabidopsis thaliana
gacgaagagagacggtg

SEQ ID NO: 177633 - DNA, 17 bp, Arabidopsis thaliana
gacgaattctcggaccc

SEQ ID NO: 177634 - DNA, 17 bp, Arabidopsis thaliana
gacgagctgctgcgcat

SEQ ID NO: 177635 - DNA, 17 bp, Arabidopsis thaliana
gacgaggaagggcgtag

SEQ ID NO: 177636 - DNA, 17 bp, Arabidopsis thaliana
gacgatttgtgacacca

SEQ ID NO: 177637 - DNA, 17 bp, Arabidopsis thaliana
gacgccaaactgtgatc

SEQ ID NO: 177638 - DNA, 17 bp, Arabidopsis thaliana
gacgcctggagcgtacc

SEQ ID NO: 177639 - DNA, 17 bp, Arabidopsis thaliana
gacgcggattacggtgg

SEQ ID NO: 177640 - DNA, 17 bp, Arabidopsis thaliana
gacgctgtgagttacta

SEQ ID NO: 177641 - DNA, 17 bp, Arabidopsis thaliana
gacgctttggccgagtg

SEQ ID NO: 177642 - DNA, 17 bp, Arabidopsis thaliana
gacggaagggcaccacc

SEQ ID NO: 177643 - DNA, 17 bp, Arabidopsis thaliana
gacggatcacagtttgg

SEQ ID NO: 177644 - DNA, 17 bp, Arabidopsis thaliana
gacggatcgcatggcct

SEQ ID NO: 177645 - DNA, 17 bp, Arabidopsis thaliana
gacggatctgaaagaag

SEQ ID NO: 177646 - DNA, 17 bp, Arabidopsis thaliana
gacgggcggtgtgtaca

SEQ ID NO: 177647 - DNA, 17 bp, Arabidopsis thaliana
gacggggggttcgccgc

SEQ ID NO: 177648 - DNA, 17 bp, Arabidopsis thaliana
gacgggttcggaactgg

SEQ ID NO: 177649 - DNA, 17 bp, Arabidopsis thaliana
gacgtccgggcggcgaa

SEQ ID NO: 177650 - DNA, 17 bp, Arabidopsis thaliana
gacgtcgcaggcggcga

SEQ ID NO: 177651 - DNA, 17 bp, Arabidopsis thaliana
gacgtcgcgagaagtca

SEQ ID NO: 177652 - DNA, 17 bp, Arabidopsis thaliana
gacgtcgcgagaagtcc

SEQ ID NO: 177653 - DNA, 17 bp, Arabidopsis thaliana
gacgtcgcgggcagcga

SEQ ID NO: 177654 - DNA, 17 bp, Arabidopsis thaliana
gacgtcgcgggcggcca

SEQ ID NO: 177655 - DNA, 17 bp, Arabidopsis thaliana
gacgtcgcgggcggcga

SEQ ID NO: 177656 - DNA, 17 bp, Arabidopsis thaliana
gacgtgcggtgctcttc

SEQ ID NO: 177657 - DNA, 17 bp, Arabidopsis thaliana
gacgttcagggacgaag

SEQ ID NO: 177658 - DNA, 17 bp, Arabidopsis thaliana
gacgttgacaattcagt

SEQ ID NO: 177659 - DNA, 17 bp, Arabidopsis thaliana
gactaagaccgtataag

SEQ ID NO: 177660 - DNA, 17 bp, Arabidopsis thaliana
gactatgaatggggttt

SEQ ID NO: 177661 - DNA, 17 bp, Arabidopsis thaliana
gactatgattaatttag

SEQ ID NO: 177662 - DNA, 17 bp, Arabidopsis thaliana
gactccatggcccaatg

SEQ ID NO: 177663 - DNA, 17 bp, Arabidopsis thaliana
gactcgcgttggcctca

SEQ ID NO: 177664 - DNA, 17 bp, Arabidopsis thaliana
gactcgtgaaagcccag

SEQ ID NO: 177665 - DNA, 17 bp, Arabidopsis thaliana
gactctcgactcattca

SEQ ID NO: 177666 - DNA, 17 bp, Arabidopsis thaliana
gactctggcccaatgga

SEQ ID NO: 177667 - DNA, 17 bp, Arabidopsis thaliana
gactctgtggcccaatg

SEQ ID NO: 177668 - DNA, 17 bp, Arabidopsis thaliana
gactctgttgcccaatg

SEQ ID NO: 177669 - DNA, 17 bp, Arabidopsis thaliana
gactgctcgagctgctt

SEQ ID NO: 177670 - DNA, 17 bp, Arabidopsis thaliana
gactgtcgtctggctcg

SEQ ID NO: 177671 - DNA, 17 bp, Arabidopsis thaliana
gactgtgaaactgcgaa

SEQ ID NO: 177672 - DNA, 17 bp, Arabidopsis thaliana
gactgttcgacgcccgg

SEQ ID NO: 177673 - DNA, 17 bp, Arabidopsis thaliana
gactgttgtctggctcg

SEQ ID NO: 177674 - DNA, 17 bp, Arabidopsis thaliana
gacttcatggcccaatg

SEQ ID NO: 177675 - DNA, 17 bp, Arabidopsis thaliana
gacttcattgcccaatg

SEQ ID NO: 177676 - DNA, 17 bp, Arabidopsis thaliana
gacttttctttcccgcc

SEQ ID NO: 177677 - DNA, 17 bp, Arabidopsis thaliana
gagaaatatctggaagt

SEQ ID NO: 177678 - DNA, 17 bp, Arabidopsis thaliana
gagaaatatctggaggt

SEQ ID NO: 177679 - DNA, 17 bp, Arabidopsis thaliana
gagaaatcgtagtttta

SEQ ID NO: 177680 - DNA, 17 bp, Arabidopsis thaliana
gagaaatggaagatata

SEQ ID NO: 177681 - DNA, 17 bp, Arabidopsis thaliana
gagaaatggaagatatc

SEQ ID NO: 177682 - DNA, 17 bp, Arabidopsis thaliana
gagaacccgaaagcgaa

SEQ ID NO: 177683 - DNA, 17 bp, Arabidopsis thaliana
gagaacgcttcgggcaa

SEQ ID NO: 177684 - DNA, 17 bp, Arabidopsis thaliana
gagaacgcttcgggcag

SEQ ID NO: 177685 - DNA, 17 bp, Arabidopsis thaliana
gagaagcggttgagttc

SEQ ID NO: 177686 - DNA, 17 bp, Arabidopsis thaliana
gagaagcgtcctcagcg

SEQ ID NO: 177687 - DNA, 17 bp, Arabidopsis thaliana
gagaaggaatggtaaga

SEQ ID NO: 177688 - DNA, 17 bp, Arabidopsis thaliana
gagaaggggtgctctcc

SEQ ID NO: 177689 - DNA, 17 bp, Arabidopsis thaliana
gagaagtcagggatgaa

SEQ ID NO: 177690 - DNA, 17 bp, Arabidopsis thaliana
gagaatcttgaggatgc

SEQ ID NO: 177691 - DNA, 17 bp, Arabidopsis thaliana
gagaatcttgatgatga

SEQ ID NO: 177692 - DNA, 17 bp, Arabidopsis thaliana
gagaatcttgatgatgc

SEQ ID NO: 177693 - DNA, 17 bp, Arabidopsis thaliana
gagacagccaggaggta

SEQ ID NO: 177694 - DNA, 17 bp, Arabidopsis thaliana
gagaccagcttccgtcc

SEQ ID NO: 177695 - DNA, 17 bp, Arabidopsis thaliana
gagacctcagcctgcta

SEQ ID NO: 177696 - DNA, 17 bp, Arabidopsis thaliana
gagacctgatgcggtta

SEQ ID NO: 177697 - DNA, 17 bp, Arabidopsis thaliana
gagacggcggcgggggc

SEQ ID NO: 177698 - DNA, 17 bp, Arabidopsis thaliana
gagacggcgggggggcc

SEQ ID NO: 177699 - DNA, 17 bp, Arabidopsis thaliana
gagagaaatcacgaaaa

SEQ ID NO: 177700 - DNA, 17 bp, Arabidopsis thaliana
gagagaacttattggcc

SEQ ID NO: 177701 - DNA, 17 bp, Arabidopsis thaliana
gagagagccgttcccag

SEQ ID NO: 177702 - DNA, 17 bp, Arabidopsis thaliana
gagagatcaagtttgtg

SEQ ID NO: 177703 - DNA, 17 bp, Arabidopsis thaliana
gagagatgatgctcaga

SEQ ID NO: 177704 - DNA, 17 bp, Arabidopsis thaliana
gagagatggctgagtgg

SEQ ID NO: 177705 - DNA, 17 bp, Arabidopsis thaliana
gagagccccgtcgtgcc

SEQ ID NO: 177706 - DNA, 17 bp, Arabidopsis thaliana
gagagggagcctgagaa

SEQ ID NO: 177707 - DNA, 17 bp, Arabidopsis thaliana
gagaggtcccgagttcg

SEQ ID NO: 177708 - DNA, 17 bp, Arabidopsis thaliana
gagaggtgaacaagcgc

SEQ ID NO: 177709 - DNA, 17 bp, Arabidopsis thaliana
gagagttgggtgtaggg

SEQ ID NO: 177710 - DNA, 17 bp, Arabidopsis thaliana
gagataagcagtgtagc

SEQ ID NO: 177711 - DNA, 17 bp, Arabidopsis thaliana
gagattctttcagtcca

SEQ ID NO: 177712 - DNA, 17 bp, Arabidopsis thaliana
gagatttacgaaactaa

SEQ ID NO: 177713 - DNA, 17 bp, Arabidopsis thaliana
gagcaagacgagttttc

SEQ ID NO: 177714 - DNA, 17 bp, Arabidopsis thaliana
gagcacatacctttgca

SEQ ID NO: 177715 - DNA, 17 bp, Arabidopsis thaliana
gagcacgcacgagcact

SEQ ID NO: 177716 - DNA, 17 bp, Arabidopsis thaliana
gagccaagcccgtgcag

SEQ ID NO: 177717 - DNA, 17 bp, Arabidopsis thaliana
gagccaaggatgacttg

SEQ ID NO: 177718 - DNA, 17 bp, Arabidopsis thaliana
gagccaagttacccaaa

SEQ ID NO: 177719 - DNA, 17 bp, Arabidopsis thaliana
gagccagacaacagtca

SEQ ID NO: 177720 - DNA, 17 bp, Arabidopsis thaliana
gagccagacaacagtcc

SEQ ID NO: 177721 - DNA, 17 bp, Arabidopsis thaliana
gagccagcaggccatgg

SEQ ID NO: 177722 - DNA, 17 bp, Arabidopsis thaliana
gagccaggcctcgatga

SEQ ID NO: 177723 - DNA, 17 bp, Arabidopsis thaliana
gagccagggatcggaca

SEQ ID NO: 177724 - DNA, 17 bp, Arabidopsis thaliana
gagccccgccggaagca

SEQ ID NO: 177725 - DNA, 17 bp, Arabidopsis thaliana
gagccgagtaacgatcc

SEQ ID NO: 177726 - DNA, 17 bp, Arabidopsis thaliana
gagcctatagctcagtg

SEQ ID NO: 177727 - DNA, 17 bp, Arabidopsis thaliana
gagcctgaccgagtagt

SEQ ID NO: 177728 - DNA, 17 bp, Arabidopsis thaliana
gagcctttttcggtcca

SEQ ID NO: 177729 - DNA, 17 bp, Arabidopsis thaliana
gagcgacgggcggtgtg

SEQ ID NO: 177730 - DNA, 17 bp, Arabidopsis thaliana
gagcgatatcgctcttc

SEQ ID NO: 177731 - DNA, 17 bp, Arabidopsis thaliana
gagcgctacggctactg

SEQ ID NO: 177732 - DNA, 17 bp, Arabidopsis thaliana
gagcgctacggttactg

SEQ ID NO: 177733 - DNA, 17 bp, Arabidopsis thaliana
gagcggaagactgtagt

SEQ ID NO: 177734 - DNA, 17 bp, Arabidopsis thaliana
gagcggcactcggtcct

SEQ ID NO: 177735 - DNA, 17 bp, Arabidopsis thaliana
gagcggcgggtagaatc

SEQ ID NO: 177736 - DNA, 17 bp, Arabidopsis thaliana
gagcgtgattgacggct

SEQ ID NO: 177737 - DNA, 17 bp, Arabidopsis thaliana
gagctcaggagggatag

SEQ ID NO: 177738 - DNA, 17 bp, Arabidopsis thaliana
gagctccttgaagttca

SEQ ID NO: 177739 - DNA, 17 bp, Arabidopsis thaliana
gagctgacctagtggcc

SEQ ID NO: 177740 - DNA, 17 bp, Arabidopsis thaliana
gagctgagaggagagag

SEQ ID NO: 177741 - DNA, 17 bp, Arabidopsis thaliana
gagctgatctagtggcc

SEQ ID NO: 177742 - DNA, 17 bp, Arabidopsis thaliana
gagctgatgactcgcgc

SEQ ID NO: 177743 - DNA, 17 bp, Arabidopsis thaliana
gagctggggttagaccg

SEQ ID NO: 177744 - DNA, 17 bp, Arabidopsis thaliana
gagctgggtttagaccg

SEQ ID NO: 177745 - DNA, 17 bp, Arabidopsis thaliana
gagcttagccttcatca

SEQ ID NO: 177746 - DNA, 17 bp, Arabidopsis thaliana
gagcttatgtggcctac

SEQ ID NO: 177747 - DNA, 17 bp, Arabidopsis thaliana
gagcttccttgagtcca

SEQ ID NO: 177748 - DNA, 17 bp, Arabidopsis thaliana
gagcttgaagttcaata

SEQ ID NO: 177749 - DNA, 17 bp, Arabidopsis thaliana
gagcttgactctagtcc

SEQ ID NO: 177750 - DNA, 17 bp, Arabidopsis thaliana
gagctttcctaaaacaa

SEQ ID NO: 177751 - DNA, 17 bp, Arabidopsis thaliana
gagctttcttcggtcca

SEQ ID NO: 177752 - DNA, 17 bp, Arabidopsis thaliana
gaggaaataggagtgga

SEQ ID NO: 177753 - DNA, 17 bp, Arabidopsis thaliana
gaggaaataggagtggc

SEQ ID NO: 177754 - DNA, 17 bp, Arabidopsis thaliana
gaggaagataggacgca

SEQ ID NO: 177755 - DNA, 17 bp, Arabidopsis thaliana
gaggaatgaggatgtat

SEQ ID NO: 177756 - DNA, 17 bp, Arabidopsis thaliana
gaggacagaccaaagaa

SEQ ID NO: 177757 - DNA, 17 bp, Arabidopsis thaliana
gaggacattgtcaggta

SEQ ID NO: 177758 - DNA, 17 bp, Arabidopsis thaliana
gaggacattgtcaggtg

SEQ ID NO: 177759 - DNA, 17 bp, Arabidopsis thaliana
gaggaccgagtgccgca

SEQ ID NO: 177760 - DNA, 17 bp, Arabidopsis thaliana
gaggaccgagtgccgct

SEQ ID NO: 177761 - DNA, 17 bp, Arabidopsis thaliana
gaggacgttgtcaggta

SEQ ID NO: 177762 - DNA, 17 bp, Arabidopsis thaliana
gaggattcgtctgacgg

SEQ ID NO: 177763 - DNA, 17 bp, Arabidopsis thaliana
gaggattggttggcaac

SEQ ID NO: 177764 - DNA, 17 bp, Arabidopsis thaliana
gaggcacctaccgagtc

SEQ ID NO: 177765 - DNA, 17 bp, Arabidopsis thaliana
gaggcagcggttcatcg

SEQ ID NO: 177766 - DNA, 17 bp, Arabidopsis thaliana
gaggcatacccttgtgg

SEQ ID NO: 177767 - DNA, 17 bp, Arabidopsis thaliana
gaggcctagaactcttt

SEQ ID NO: 177768 - DNA, 17 bp, Arabidopsis thaliana
gaggcctcaggatctgc

SEQ ID NO: 177769 - DNA, 17 bp, Arabidopsis thaliana
gaggccttcgccgacgt

SEQ ID NO: 177770 - DNA, 17 bp, Arabidopsis thaliana
gaggctcgcagcggttc

SEQ ID NO: 177771 - DNA, 17 bp, Arabidopsis thaliana
gaggctgatgttgtgat

SEQ ID NO: 177772 - DNA, 17 bp, Arabidopsis thaliana
gaggcttccaaaaattg

SEQ ID NO: 177773 - DNA, 17 bp, Arabidopsis thaliana
gagggaaaaccaactga

SEQ ID NO: 177774 - DNA, 17 bp, Arabidopsis thaliana
gagggacaatatttgca

SEQ ID NO: 177775 - DNA, 17 bp, Arabidopsis thaliana
gagggacgaatgcacga

SEQ ID NO: 177776 - DNA, 17 bp, Arabidopsis thaliana
gagggacgaatgcacgt

SEQ ID NO: 177777 - DNA, 17 bp, Arabidopsis thaliana
gagggacgacgatttgt

SEQ ID NO: 177778 - DNA, 17 bp, Arabidopsis thaliana
gagggagcctgagaaac

SEQ ID NO: 177779 - DNA, 17 bp, Arabidopsis thaliana
gagggatcccgccaatc

SEQ ID NO: 177780 - DNA, 17 bp, Arabidopsis thaliana
gagggatctcacttcac

SEQ ID NO: 177781 - DNA, 17 bp, Arabidopsis thaliana
gagggatctgccttcgg

SEQ ID NO: 177782 - DNA, 17 bp, Arabidopsis thaliana
gagggctctcactttac

SEQ ID NO: 177783 - DNA, 17 bp, Arabidopsis thaliana
gagggctgggctcgggg

SEQ ID NO: 177784 - DNA, 17 bp, Arabidopsis thaliana
gaggggtgaaatctaca

SEQ ID NO: 177785 - DNA, 17 bp, Arabidopsis thaliana
gagggtaatgcgtgagg

SEQ ID NO: 177786 - DNA, 17 bp, Arabidopsis thaliana
gagggtcctgctttcga

SEQ ID NO: 177787 - DNA, 17 bp, Arabidopsis thaliana
gagggtcgaatcttagc

SEQ ID NO: 177788 - DNA, 17 bp, Arabidopsis thaliana
gagggtcggcaatcgag

SEQ ID NO: 177789 - DNA, 17 bp, Arabidopsis thaliana
gagggtcggcaatcggg

SEQ ID NO: 177790 - DNA, 17 bp, Arabidopsis thaliana
gaggtagggtccagcgg

SEQ ID NO: 177791 - DNA, 17 bp, Arabidopsis thaliana
gaggtccctactgaatt

SEQ ID NO: 177792 - DNA, 17 bp, Arabidopsis thaliana
gaggtgtcagaaaagtt

SEQ ID NO: 177793 - DNA, 17 bp, Arabidopsis thaliana
gaggtgtgcgaaggtag

SEQ ID NO: 177794 - DNA, 17 bp, Arabidopsis thaliana
gagtaccggggaagtat

SEQ ID NO: 177795 - DNA, 17 bp, Arabidopsis thaliana
gagtatggtcgcaagga

SEQ ID NO: 177796 - DNA, 17 bp, Arabidopsis thaliana
gagtatggtcgcaaggc

SEQ ID NO: 177797 - DNA, 17 bp, Arabidopsis thaliana
gagtcatcagcccgcgt

SEQ ID NO: 177798 - DNA, 17 bp, Arabidopsis thaliana
gagtcatcagctcgcgt

SEQ ID NO: 177799 - DNA, 17 bp, Arabidopsis thaliana
gagtcccaccgggtgtg

SEQ ID NO: 177800 - DNA, 17 bp, Arabidopsis thaliana
gagtccgcttatctcca

SEQ ID NO: 177801 - DNA, 17 bp, Arabidopsis thaliana
gagtccggagacgtcgg

SEQ ID NO: 177802 - DNA, 17 bp, Arabidopsis thaliana
gagtcttacgctggcca

SEQ ID NO: 177803 - DNA, 17 bp, Arabidopsis thaliana
gagtctttaggcacagt

SEQ ID NO: 177804 - DNA, 17 bp, Arabidopsis thaliana
gagtgatgacgccattg

SEQ ID NO: 177805 - DNA, 17 bp, Arabidopsis thaliana
gagtgattcctcgggca

SEQ ID NO: 177806 - DNA, 17 bp, Arabidopsis thaliana
gagtggaccaggcaggc

SEQ ID NO: 177807 - DNA, 17 bp, Arabidopsis thaliana
gagtggcaccgtgggtt

SEQ ID NO: 177808 - DNA, 17 bp, Arabidopsis thaliana
gagtggcgcagcggaag

SEQ ID NO: 177809 - DNA, 17 bp, Arabidopsis thaliana
gagtggcgcatcggaag

SEQ ID NO: 177810 - DNA, 17 bp, Arabidopsis thaliana
gagtggtctaaggcgcc

SEQ ID NO: 177811 - DNA, 17 bp, Arabidopsis thaliana
gagtgtccgatttctaa

SEQ ID NO: 177812 - DNA, 17 bp, Arabidopsis thaliana
gagttacaactttttta

SEQ ID NO: 177813 - DNA, 17 bp, Arabidopsis thaliana
gagttcacaccacgaaa

SEQ ID NO: 177814 - DNA, 17 bp, Arabidopsis thaliana
gagttcacaccttggcc

SEQ ID NO: 177815 - DNA, 17 bp, Arabidopsis thaliana
gagttccggcaagacct

SEQ ID NO: 177816 - DNA, 17 bp, Arabidopsis thaliana
gagttcgattcacggct

SEQ ID NO: 177817 - DNA, 17 bp, Arabidopsis thaliana
gagttctatcgggtaaa

SEQ ID NO: 177818 - DNA, 17 bp, Arabidopsis thaliana
gagttgcatctaccaca

SEQ ID NO: 177819 - DNA, 17 bp, Arabidopsis thaliana
gagtttatagggttgga

SEQ ID NO: 177820 - DNA, 17 bp, Arabidopsis thaliana
gagtttgatgacgaggt

SEQ ID NO: 177821 - DNA, 17 bp, Arabidopsis thaliana
gagtttggctggggcga

SEQ ID NO: 177822 - DNA, 17 bp, Arabidopsis thaliana
gagtttggctggggcgg

SEQ ID NO: 177823 - DNA, 17 bp, Arabidopsis thaliana
gagttttcccaaaacga

SEQ ID NO: 177824 - DNA, 17 bp, Arabidopsis thaliana
gagttttcttcggtcca

SEQ ID NO: 177825 - DNA, 17 bp, Arabidopsis thaliana
gataaaacctaataagt

SEQ ID NO: 177826 - DNA, 17 bp, Arabidopsis thaliana
gataaaaggtcgacgca

SEQ ID NO: 177827 - DNA, 17 bp, Arabidopsis thaliana
gataacaggacgcttgt

SEQ ID NO: 177828 - DNA, 17 bp, Arabidopsis thaliana
gataacgcaggtgtcca

SEQ ID NO: 177829 - DNA, 17 bp, Arabidopsis thaliana
gataacgcaggtgtcct

SEQ ID NO: 177830 - DNA, 17 bp, Arabidopsis thaliana
gataagtgggagcttcg

SEQ ID NO: 177831 - DNA, 17 bp, Arabidopsis thaliana
gatacagacccgggttc

SEQ ID NO: 177832 - DNA, 17 bp, Arabidopsis thaliana
gatacggtgtctttctg

SEQ ID NO: 177833 - DNA, 17 bp, Arabidopsis thaliana
gatacttggtgtgaatt

SEQ ID NO: 177834 - DNA, 17 bp, Arabidopsis thaliana
gatacttttcaaaactg

SEQ ID NO: 177835 - DNA, 17 bp, Arabidopsis thaliana
gatagaatcctctgcag

SEQ ID NO: 177836 - DNA, 17 bp, Arabidopsis thaliana
gatagatcattgcaatt

SEQ ID NO: 177837 - DNA, 17 bp, Arabidopsis thaliana
gataggaagagccgaca

SEQ ID NO: 177838 - DNA, 17 bp, Arabidopsis thaliana
gataggccacgctttca

SEQ ID NO: 177839 - DNA, 17 bp, Arabidopsis thaliana
gatagtaaaggcgagtt

SEQ ID NO: 177840 - DNA, 17 bp, Arabidopsis thaliana
gatatctcggctctcgc

SEQ ID NO: 177841 - DNA, 17 bp, Arabidopsis thaliana
gatatctgagtcgatag

SEQ ID NO: 177842 - DNA, 17 bp, Arabidopsis thaliana
gatatgacactgatgct

SEQ ID NO: 177843 - DNA, 17 bp, Arabidopsis thaliana
gatatgaccaaaacaga

SEQ ID NO: 177844 - DNA, 17 bp, Arabidopsis thaliana
gatatgaggtgctttga

SEQ ID NO: 177845 - DNA, 17 bp, Arabidopsis thaliana
gatatggtctttttcag

SEQ ID NO: 177846 - DNA, 17 bp, Arabidopsis thaliana
gatatttgttttaggaa

SEQ ID NO: 177847 - DNA, 17 bp, Arabidopsis thaliana
gatcaaaaggaaaatga

SEQ ID NO: 177848 - DNA, 17 bp, Arabidopsis thaliana
gatcaagtttgtgggaa

SEQ ID NO: 177849 - DNA, 17 bp, Arabidopsis thaliana
gatcaagtttgtgggag

SEQ ID NO: 177850 - DNA, 17 bp, Arabidopsis thaliana
gatcaagtttgtgggta

SEQ ID NO: 177851 - DNA, 17 bp, Arabidopsis thaliana
gatcacatgatgtgcaa

SEQ ID NO: 177852 - DNA, 17 bp, Arabidopsis thaliana
gatcagaatcttgatga

SEQ ID NO: 177853 - DNA, 17 bp, Arabidopsis thaliana
gatcagcggatgttgct

SEQ ID NO: 177854 - DNA, 17 bp, Arabidopsis thaliana
gatcagggccgggctcg

SEQ ID NO: 177855 - DNA, 17 bp, Arabidopsis thaliana
gatcatcctgtagatgg

SEQ ID NO: 177856 - DNA, 17 bp, Arabidopsis thaliana
gatcattcgttcctatg

SEQ ID NO: 177857 - DNA, 17 bp, Arabidopsis thaliana
gatcattgcaccttgta

SEQ ID NO: 177858 - DNA, 17 bp, Arabidopsis thaliana
gatccactgagattcag

SEQ ID NO: 177859 - DNA, 17 bp, Arabidopsis thaliana
gatccatctacagatcc

SEQ ID NO: 177860 - DNA, 17 bp, Arabidopsis thaliana
gatcccaaggaaggcag

SEQ ID NO: 177861 - DNA, 17 bp, Arabidopsis thaliana
gatccccacagacggcg

SEQ ID NO: 177862 - DNA, 17 bp, Arabidopsis thaliana
gatcccgaaggccaaca

SEQ ID NO: 177863 - DNA, 17 bp, Arabidopsis thaliana
gatcccgccaccgatac

SEQ ID NO: 177864 - DNA, 17 bp, Arabidopsis thaliana
gatcccgccttgcatca

SEQ ID NO: 177865 - DNA, 17 bp, Arabidopsis thaliana
gatcccgtccgcccccc

SEQ ID NO: 177866 - DNA, 17 bp, Arabidopsis thaliana
gatcccgtccgctctcc

SEQ ID NO: 177867 - DNA, 17 bp, Arabidopsis thaliana
gatccgtcgctgccgtg

SEQ ID NO: 177868 - DNA, 17 bp, Arabidopsis thaliana
gatcctaacaagcgtcc

SEQ ID NO: 177869 - DNA, 17 bp, Arabidopsis thaliana
gatcctattgtgttggc

SEQ ID NO: 177870 - DNA, 17 bp, Arabidopsis thaliana
gatcctccctctccgga

SEQ ID NO: 177871 - DNA, 17 bp, Arabidopsis thaliana
gatccttagtcgcatcc

SEQ ID NO: 177872 - DNA, 17 bp, Arabidopsis thaliana
gatccttcgatgtcggc

SEQ ID NO: 177873 - DNA, 17 bp, Arabidopsis thaliana
gatcctttagaccttcg

SEQ ID NO: 177874 - DNA, 17 bp, Arabidopsis thaliana
gatcgaaaggtcaaatc

SEQ ID NO: 177875 - DNA, 17 bp, Arabidopsis thaliana
gatcgacggaccggatt

SEQ ID NO: 177876 - DNA, 17 bp, Arabidopsis thaliana
gatcgataaacctctgc

SEQ ID NO: 177877 - DNA, 17 bp, Arabidopsis thaliana
gatcgattcggggcgtg

SEQ ID NO: 177878 - DNA, 17 bp, Arabidopsis thaliana
gatcgattcgtaccagc

SEQ ID NO: 177879 - DNA, 17 bp, Arabidopsis thaliana
gatcgctcaagaaagct

SEQ ID NO: 177880 - DNA, 17 bp, Arabidopsis thaliana
gatcggactgttgtctg

SEQ ID NO: 177881 - DNA, 17 bp, Arabidopsis thaliana
gatcggcggaccggatt

SEQ ID NO: 177882 - DNA, 17 bp, Arabidopsis thaliana
gatcggtaccccgcatc

SEQ ID NO: 177883 - DNA, 17 bp, Arabidopsis thaliana
gatcgtaacctggctct

SEQ ID NO: 177884 - DNA, 17 bp, Arabidopsis thaliana
gatcgttaccccgcatc

SEQ ID NO: 177885 - DNA, 17 bp, Arabidopsis thaliana
gatctatctgcaacagg

SEQ ID NO: 177886 - DNA, 17 bp, Arabidopsis thaliana
gatctattggcttctac

SEQ ID NO: 177887 - DNA, 17 bp, Arabidopsis thaliana
gatctcgccttgcatca

SEQ ID NO: 177888 - DNA, 17 bp, Arabidopsis thaliana
gatctcgcgctctgtaa

SEQ ID NO: 177889 - DNA, 17 bp, Arabidopsis thaliana
gatctcgcgctctgtat

SEQ ID NO: 177890 - DNA, 17 bp, Arabidopsis thaliana
gatctcgtagttgtatg

SEQ ID NO: 177891 - DNA, 17 bp, Arabidopsis thaliana
gatctcgtggttgtatg

SEQ ID NO: 177892 - DNA, 17 bp, Arabidopsis thaliana
gatctctaggtctcgtg

SEQ ID NO: 177893 - DNA, 17 bp, Arabidopsis thaliana
gatctgacaatcattta

SEQ ID NO: 177894 - DNA, 17 bp, Arabidopsis thaliana
gatctgagcctgatttt

SEQ ID NO: 177895 - DNA, 17 bp, Arabidopsis thaliana
gatctgcaccaagcgag

SEQ ID NO: 177896 - DNA, 17 bp, Arabidopsis thaliana
gatctggttgacatcct

SEQ ID NO: 177897 - DNA, 17 bp, Arabidopsis thaliana
gatctgtacacaccgcc

SEQ ID NO: 177898 - DNA, 17 bp, Arabidopsis thaliana
gatcttagaaaatgatc

SEQ ID NO: 177899 - DNA, 17 bp, Arabidopsis thaliana
gatcttagaaaattatt

SEQ ID NO: 177900 - DNA, 17 bp, Arabidopsis thaliana
gatcttctttgcaataa

SEQ ID NO: 177901 - DNA, 17 bp, Arabidopsis thaliana
gatcttgaaagtgacta

SEQ ID NO: 177902 - DNA, 17 bp, Arabidopsis thaliana
gatcttgagccgtgcca

SEQ ID NO: 177903 - DNA, 17 bp, Arabidopsis thaliana
gatctttggagatgatt

SEQ ID NO: 177904 - DNA, 17 bp, Arabidopsis thaliana
gatgaaaggttggtaga

SEQ ID NO: 177905 - DNA, 17 bp, Arabidopsis thaliana
gatgaaccgctgcctcc

SEQ ID NO: 177906 - DNA, 17 bp, Arabidopsis thaliana
gatgaaccgctgcctcg

SEQ ID NO: 177907 - DNA, 17 bp, Arabidopsis thaliana
gatgaaccgctgcctga

SEQ ID NO: 177908 - DNA, 17 bp, Arabidopsis thaliana
gatgaatcagcgggtga

SEQ ID NO: 177909 - DNA, 17 bp, Arabidopsis thaliana
gatgaatgctacctggt

SEQ ID NO: 177910 - DNA, 17 bp, Arabidopsis thaliana
gatgaattgtcagtata

SEQ ID NO: 177911 - DNA, 17 bp, Arabidopsis thaliana
gatgacagcgacgggat

SEQ ID NO: 177912 - DNA, 17 bp, Arabidopsis thaliana
gatgacctccgtggata

SEQ ID NO: 177913 - DNA, 17 bp, Arabidopsis thaliana
gatgacctccgtggatg

SEQ ID NO: 177914 - DNA, 17 bp, Arabidopsis thaliana
gatgacggcctcgtcca

SEQ ID NO: 177915 - DNA, 17 bp, Arabidopsis thaliana
gatgactcagccctaga

SEQ ID NO: 177916 - DNA, 17 bp, Arabidopsis thaliana
gatgagatcgtacaagc

SEQ ID NO: 177917 - DNA, 17 bp, Arabidopsis thaliana
gatgagctttggcggga

SEQ ID NO: 177918 - DNA, 17 bp, Arabidopsis thaliana
gatgagtcggcagatga

SEQ ID NO: 177919 - DNA, 17 bp, Arabidopsis thaliana
gatgagttccggggcct

SEQ ID NO: 177920 - DNA, 17 bp, Arabidopsis thaliana
gatgatagccatgtcca

SEQ ID NO: 177921 - DNA, 17 bp, Arabidopsis thaliana
gatgatgatctttttct

SEQ ID NO: 177922 - DNA, 17 bp, Arabidopsis thaliana
gatgatgcatttcatta

SEQ ID NO: 177923 - DNA, 17 bp, Arabidopsis thaliana
gatgatgctgaccgaat

SEQ ID NO: 177924 - DNA, 17 bp, Arabidopsis thaliana
gatgatgtctgtaggct

SEQ ID NO: 177925 - DNA, 17 bp, Arabidopsis thaliana
gatgcatgtgaagatat

SEQ ID NO: 177926 - DNA, 17 bp, Arabidopsis thaliana
gatgcatttcattattc

SEQ ID NO: 177927 - DNA, 17 bp, Arabidopsis thaliana
gatgccgaccagggatc

SEQ ID NO: 177928 - DNA, 17 bp, Arabidopsis thaliana
gatgcggattacggtgg

SEQ ID NO: 177929 - DNA, 17 bp, Arabidopsis thaliana
gatgcgggacggaagca

SEQ ID NO: 177930 - DNA, 17 bp, Arabidopsis thaliana
gatgcgggatgaaccga

SEQ ID NO: 177931 - DNA, 17 bp, Arabidopsis thaliana
gatgcgggatggaagct

SEQ ID NO: 177932 - DNA, 17 bp, Arabidopsis thaliana
gatgcgtcctggtcgga

SEQ ID NO: 177933 - DNA, 17 bp, Arabidopsis thaliana
gatgcgtcctggtcggt

SEQ ID NO: 177934 - DNA, 17 bp, Arabidopsis thaliana
gatgcgtttgcgaagga

SEQ ID NO: 177935 - DNA, 17 bp, Arabidopsis thaliana
gatgctaatttaccatc

SEQ ID NO: 177936 - DNA, 17 bp, Arabidopsis thaliana
gatgctcagattcttgc

SEQ ID NO: 177937 - DNA, 17 bp, Arabidopsis thaliana
gatgctctgggccgcac

SEQ ID NO: 177938 - DNA, 17 bp, Arabidopsis thaliana
gatgctgaccggatgta

SEQ ID NO: 177939 - DNA, 17 bp, Arabidopsis thaliana
gatggagtgatgcttct

SEQ ID NO: 177940 - DNA, 17 bp, Arabidopsis thaliana
gatggatatgtcttcaa

SEQ ID NO: 177941 - DNA, 17 bp, Arabidopsis thaliana
gatggatctcgccctgt

SEQ ID NO: 177942 - DNA, 17 bp, Arabidopsis thaliana
gatggatctcggaccaa

SEQ ID NO: 177943 - DNA, 17 bp, Arabidopsis thaliana
gatggatctcggaccag

SEQ ID NO: 177944 - DNA, 17 bp, Arabidopsis thaliana
gatggatctgactcgaa

SEQ ID NO: 177945 - DNA, 17 bp, Arabidopsis thaliana
gatggatcttctcaatt

SEQ ID NO: 177946 - DNA, 17 bp, Arabidopsis thaliana
gatggatcttggcattc

SEQ ID NO: 177947 - DNA, 17 bp, Arabidopsis thaliana
gatggcgcttaagcgcg

SEQ ID NO: 177948 - DNA, 17 bp, Arabidopsis thaliana
gatggggatagatcatt

SEQ ID NO: 177949 - DNA, 17 bp, Arabidopsis thaliana
gatgggggccggcgatg

SEQ ID NO: 177950 - DNA, 17 bp, Arabidopsis thaliana
gatgggggggcagaggc

SEQ ID NO: 177951 - DNA, 17 bp, Arabidopsis thaliana
gatggggtatccctaca

SEQ ID NO: 177952 - DNA, 17 bp, Arabidopsis thaliana
gatggggtgatgcttct

SEQ ID NO: 177953 - DNA, 17 bp, Arabidopsis thaliana
gatgggtgagaactgtt

SEQ ID NO: 177954 - DNA, 17 bp, Arabidopsis thaliana
gatggtagttcaagtaa

SEQ ID NO: 177955 - DNA, 17 bp, Arabidopsis thaliana
gatggtagttcaagtat

SEQ ID NO: 177956 - DNA, 17 bp, Arabidopsis thaliana
gatggtagttcaggtat

SEQ ID NO: 177957 - DNA, 17 bp, Arabidopsis thaliana
gatggtgaactatgcct

SEQ ID NO: 177958 - DNA, 17 bp, Arabidopsis thaliana
gatggtgagggacgacg

SEQ ID NO: 177959 - DNA, 17 bp, Arabidopsis thaliana
gatggtgcaaggtatac

SEQ ID NO: 177960 - DNA, 17 bp, Arabidopsis thaliana
gatgtaacgcatgttgt

SEQ ID NO: 177961 - DNA, 17 bp, Arabidopsis thaliana
gatgtcgatggcccgag

SEQ ID NO: 177962 - DNA, 17 bp, Arabidopsis thaliana
gatgtcgtccagcgata

SEQ ID NO: 177963 - DNA, 17 bp, Arabidopsis thaliana
gatgtcgtccagcggaa

SEQ ID NO: 177964 - DNA, 17 bp, Arabidopsis thaliana
gatgtcgtccagcggta

SEQ ID NO: 177965 - DNA, 17 bp, Arabidopsis thaliana
gatgtcgtccagcggtt

SEQ ID NO: 177966 - DNA, 17 bp, Arabidopsis thaliana
gatgtgactgaccttaa

SEQ ID NO: 177967 - DNA, 17 bp, Arabidopsis thaliana
gatgtgctgtgcctgaa

SEQ ID NO: 177968 - DNA, 17 bp, Arabidopsis thaliana
gatgtgtcggtgaagcc

SEQ ID NO: 177969 - DNA, 17 bp, Arabidopsis thaliana
gatgtgttcggatcgcg

SEQ ID NO: 177970 - DNA, 17 bp, Arabidopsis thaliana
gatgttctgggccgcac

SEQ ID NO: 177971 - DNA, 17 bp, Arabidopsis thaliana
gattaagacagcaggaa

SEQ ID NO: 177972 - DNA, 17 bp, Arabidopsis thaliana
gattaagccatgcatgt

SEQ ID NO: 177973 - DNA, 17 bp, Arabidopsis thaliana
gattaccaaatgtattg

SEQ ID NO: 177974 - DNA, 17 bp, Arabidopsis thaliana
gattacggtggcggcct

SEQ ID NO: 177975 - DNA, 17 bp, Arabidopsis thaliana
gattactcagccctaga

SEQ ID NO: 177976 - DNA, 17 bp, Arabidopsis thaliana
gattagataccctggta

SEQ ID NO: 177977 - DNA, 17 bp, Arabidopsis thaliana
gattagcatggcccctg

SEQ ID NO: 177978 - DNA, 17 bp, Arabidopsis thaliana
gattagcgccgcgaccg

SEQ ID NO: 177979 - DNA, 17 bp, Arabidopsis thaliana
gattcagccctttgtcg

SEQ ID NO: 177980 - DNA, 17 bp, Arabidopsis thaliana
gattcatgataactcga

SEQ ID NO: 177981 - DNA, 17 bp, Arabidopsis thaliana
gattcccgctatccgcc

SEQ ID NO: 177982 - DNA, 17 bp, Arabidopsis thaliana
gattcccggctggtgca

SEQ ID NO: 177983 - DNA, 17 bp, Arabidopsis thaliana
gattcctaaagggcgct

SEQ ID NO: 177984 - DNA, 17 bp, Arabidopsis thaliana
gattcctcggacccggt

SEQ ID NO: 177985 - DNA, 17 bp, Arabidopsis thaliana
gattcctcgggcagtcc

SEQ ID NO: 177986 - DNA, 17 bp, Arabidopsis thaliana
gattccttgcccgccgg

SEQ ID NO: 177987 - DNA, 17 bp, Arabidopsis thaliana
gattcgtgccagccccg

SEQ ID NO: 177988 - DNA, 17 bp, Arabidopsis thaliana
gattctaccacgtatca

SEQ ID NO: 177989 - DNA, 17 bp, Arabidopsis thaliana
gattctacttgctctag

SEQ ID NO: 177990 - DNA, 17 bp, Arabidopsis thaliana
gattctctgtgtaagcg

SEQ ID NO: 177991 - DNA, 17 bp, Arabidopsis thaliana
gattctgcccaaatggt

SEQ ID NO: 177992 - DNA, 17 bp, Arabidopsis thaliana
gattctggaccccgaga

SEQ ID NO: 177993 - DNA, 17 bp, Arabidopsis thaliana
gattcttccccaacggc

SEQ ID NO: 177994 - DNA, 17 bp, Arabidopsis thaliana
gattgacgggcgttctg

SEQ ID NO: 177995 - DNA, 17 bp, Arabidopsis thaliana
gattgcggtgcggaagg

SEQ ID NO: 177996 - DNA, 17 bp, Arabidopsis thaliana
gattggaccaggcttca

SEQ ID NO: 177997 - DNA, 17 bp, Arabidopsis thaliana
gattggactgaagggaa

SEQ ID NO: 177998 - DNA, 17 bp, Arabidopsis thaliana
gattggactgaagggac

SEQ ID NO: 177999 - DNA, 17 bp, Arabidopsis thaliana
gattggactgaagggag

SEQ ID NO: 178000 - DNA, 17 bp, Arabidopsis thaliana
gattggactgaagggca

SEQ ID NO: 178001 - DNA, 17 bp, Arabidopsis thaliana
gattggactgaagggct

SEQ ID NO: 178002 - DNA, 17 bp, Arabidopsis thaliana
gattggactgaaggggg

SEQ ID NO: 178003 - DNA, 17 bp, Arabidopsis thaliana
gattggactgaagggtg

SEQ ID NO: 178004 - DNA, 17 bp, Arabidopsis thaliana
gattggattcgcgtcac

SEQ ID NO: 178005 - DNA, 17 bp, Arabidopsis thaliana
gattgggtctcactacc

SEQ ID NO: 178006 - DNA, 17 bp, Arabidopsis thaliana
gattgtcagatctaatt

SEQ ID NO: 178007 - DNA, 17 bp, Arabidopsis thaliana
gattgtgaatccaccaa

SEQ ID NO: 178008 - DNA, 17 bp, Arabidopsis thaliana
gattgtgaatccaccat

SEQ ID NO: 178009 - DNA, 17 bp, Arabidopsis thaliana
gattgtgcaccagccta

SEQ ID NO: 178010 - DNA, 17 bp, Arabidopsis thaliana
gattgttcgggagacat

SEQ ID NO: 178011 - DNA, 17 bp, Arabidopsis thaliana
gattgtttggaatctat

SEQ ID NO: 178012 - DNA, 17 bp, Arabidopsis thaliana
gatttatctgcaacagg

SEQ ID NO: 178013 - DNA, 17 bp, Arabidopsis thaliana
gatttcaactcctggtc

SEQ ID NO: 178014 - DNA, 17 bp, Arabidopsis thaliana
gatttccacagcgggcg

SEQ ID NO: 178015 - DNA, 17 bp, Arabidopsis thaliana
gatttctttcctaggtt

SEQ ID NO: 178016 - DNA, 17 bp, Arabidopsis thaliana
gatttggctttgagtta

SEQ ID NO: 178017 - DNA, 17 bp, Arabidopsis thaliana
gatttggctttgagttt

SEQ ID NO: 178018 - DNA, 17 bp, Arabidopsis thaliana
gatttgggccaacacgc

SEQ ID NO: 178019 - DNA, 17 bp, Arabidopsis thaliana
gattttgttttcggggt

SEQ ID NO: 178020 - DNA, 17 bp, Arabidopsis thaliana
gatttttcatttacaga

SEQ ID NO: 178021 - DNA, 17 bp, Arabidopsis thaliana
gatttttctaatagcga

SEQ ID NO: 178022 - DNA, 17 bp, Arabidopsis thaliana
gattttttttcataagg

SEQ ID NO: 178023 - DNA, 17 bp, Arabidopsis thaliana
gattttttttctttcta

SEQ ID NO: 178024 - DNA, 17 bp, Arabidopsis thaliana
gcaaaggatggtgaggg

SEQ ID NO: 178025 - DNA, 17 bp, Arabidopsis thaliana
gcaaaggattctacccg

SEQ ID NO: 178026 - DNA, 17 bp, Arabidopsis thaliana
gcaaaggtttcctcggg

SEQ ID NO: 178027 - DNA, 17 bp, Arabidopsis thaliana
gcaaatacagctgagca

SEQ ID NO: 178028 - DNA, 17 bp, Arabidopsis thaliana
gcaaatgatgatcttac

SEQ ID NO: 178029 - DNA, 17 bp, Arabidopsis thaliana
gcaacacaagtctcacc

SEQ ID NO: 178030 - DNA, 17 bp, Arabidopsis thaliana
gcaacagagcaacaaca

SEQ ID NO: 178031 - DNA, 17 bp, Arabidopsis thaliana
gcaacatccgctgatcc

SEQ ID NO: 178032 - DNA, 17 bp, Arabidopsis thaliana
gcaacatcttcaagaaa

SEQ ID NO: 178033 - DNA, 17 bp, Arabidopsis thaliana
gcaacatcttcaagata

SEQ ID NO: 178034 - DNA, 17 bp, Arabidopsis thaliana
gcaacatcttcaagatt

SEQ ID NO: 178035 - DNA, 17 bp, Arabidopsis thaliana
gcaacccttcggcagct

SEQ ID NO: 178036 - DNA, 17 bp, Arabidopsis thaliana
gcaacctgtagatggat

SEQ ID NO: 178037 - DNA, 17 bp, Arabidopsis thaliana
gcaacgactggagtgga

SEQ ID NO: 178038 - DNA, 17 bp, Arabidopsis thaliana
gcaacgactggagtggg

SEQ ID NO: 178039 - DNA, 17 bp, Arabidopsis thaliana
gcaacggatatctcgac

SEQ ID NO: 178040 - DNA, 17 bp, Arabidopsis thaliana
gcaacggcgcagaccgg

SEQ ID NO: 178041 - DNA, 17 bp, Arabidopsis thaliana
gcaacgggcagagcccg

SEQ ID NO: 178042 - DNA, 17 bp, Arabidopsis thaliana
gcaacggtgcacttggc

SEQ ID NO: 178043 - DNA, 17 bp, Arabidopsis thaliana
gcaactcttgcgggaga

SEQ ID NO: 178044 - DNA, 17 bp, Arabidopsis thaliana
gcaacttatgagggagc

SEQ ID NO: 178045 - DNA, 17 bp, Arabidopsis thaliana
gcaagacattgtttgag

SEQ ID NO: 178046 - DNA, 17 bp, Arabidopsis thaliana
gcaagagcatgagaggt

SEQ ID NO: 178047 - DNA, 17 bp, Arabidopsis thaliana
gcaagagccaggcctcg

SEQ ID NO: 178048 - DNA, 17 bp, Arabidopsis thaliana
gcaagatggatcttgat

SEQ ID NO: 178049 - DNA, 17 bp, Arabidopsis thaliana
gcaagcaagatgtagct

SEQ ID NO: 178050 - DNA, 17 bp, Arabidopsis thaliana
gcaagcgggagtcacca

SEQ ID NO: 178051 - DNA, 17 bp, Arabidopsis thaliana
gcaaggcaacaaatgcg

SEQ ID NO: 178052 - DNA, 17 bp, Arabidopsis thaliana
gcaaggccactctgcca

SEQ ID NO: 178053 - DNA, 17 bp, Arabidopsis thaliana
gcaaggctcaagaacgg

SEQ ID NO: 178054 - DNA, 17 bp, Arabidopsis thaliana
gcaagggaagtcggcaa

SEQ ID NO: 178055 - DNA, 17 bp, Arabidopsis thaliana
gcaaggtatactttgtt

SEQ ID NO: 178056 - DNA, 17 bp, Arabidopsis thaliana
gcaagtgatgatgaaaa

SEQ ID NO: 178057 - DNA, 17 bp, Arabidopsis thaliana
gcaagttgaccctggct

SEQ ID NO: 178058 - DNA, 17 bp, Arabidopsis thaliana
gcaagttgaccttcgct

SEQ ID NO: 178059 - DNA, 17 bp, Arabidopsis thaliana
gcaagttgaccttgact

SEQ ID NO: 178060 - DNA, 17 bp, Arabidopsis thaliana
gcaagttgaccttggca

SEQ ID NO: 178061 - DNA, 17 bp, Arabidopsis thaliana
gcaagttgaccttggcc

SEQ ID NO: 178062 - DNA, 17 bp, Arabidopsis thaliana
gcaagttgaccttggct

SEQ ID NO: 178063 - DNA, 17 bp, Arabidopsis thaliana
gcaagttgaccttggtc

SEQ ID NO: 178064 - DNA, 17 bp, Arabidopsis thaliana
gcaagttgactttggct

SEQ ID NO: 178065 - DNA, 17 bp, Arabidopsis thaliana
gcaagttgtccttggct

SEQ ID NO: 178066 - DNA, 17 bp, Arabidopsis thaliana
gcaataacaggtctgtg

SEQ ID NO: 178067 - DNA, 17 bp, Arabidopsis thaliana
gcaatacgctcctggtc

SEQ ID NO: 178068 - DNA, 17 bp, Arabidopsis thaliana
gcaatagacccaggttc

SEQ ID NO: 178069 - DNA, 17 bp, Arabidopsis thaliana
gcaatagacccgggtct

SEQ ID NO: 178070 - DNA, 17 bp, Arabidopsis thaliana
gcaatagacccgggttc

SEQ ID NO: 178071 - DNA, 17 bp, Arabidopsis thaliana
gcaatagactgtacgta

SEQ ID NO: 178072 - DNA, 17 bp, Arabidopsis thaliana
gcaatcattacaggtct

SEQ ID NO: 178073 - DNA, 17 bp, Arabidopsis thaliana
gcaatcggacggtggag

SEQ ID NO: 178074 - DNA, 17 bp, Arabidopsis thaliana
gcaatcgggcggcgggc

SEQ ID NO: 178075 - DNA, 17 bp, Arabidopsis thaliana
gcaatcttgatgatgct

SEQ ID NO: 178076 - DNA, 17 bp, Arabidopsis thaliana
gcaatggcggattgggc

SEQ ID NO: 178077 - DNA, 17 bp, Arabidopsis thaliana
gcaatgtgatttctgcc

SEQ ID NO: 178078 - DNA, 17 bp, Arabidopsis thaliana
gcaattggtgcggacga

SEQ ID NO: 178079 - DNA, 17 bp, Arabidopsis thaliana
gcacactgatgctgaca

SEQ ID NO: 178080 - DNA, 17 bp, Arabidopsis thaliana
gcacagacaacgaaaga

SEQ ID NO: 178081 - DNA, 17 bp, Arabidopsis thaliana
gcacaggcttggctcaa

SEQ ID NO: 178082 - DNA, 17 bp, Arabidopsis thaliana
gcacatcaatatgcttg

SEQ ID NO: 178083 - DNA, 17 bp, Arabidopsis thaliana
gcaccaaggagtccaca

SEQ ID NO: 178084 - DNA, 17 bp, Arabidopsis thaliana
gcaccaccaggagtgga

SEQ ID NO: 178085 - DNA, 17 bp, Arabidopsis thaliana
gcaccaccaggggtgga

SEQ ID NO: 178086 - DNA, 17 bp, Arabidopsis thaliana
gcacccatcgcctaatg

SEQ ID NO: 178087 - DNA, 17 bp, Arabidopsis thaliana
gcacccatggcctaatg

SEQ ID NO: 178088 - DNA, 17 bp, Arabidopsis thaliana
gcacccattgcctaatg

SEQ ID NO: 178089 - DNA, 17 bp, Arabidopsis thaliana
gcacccgtcgcctaatg

SEQ ID NO: 178090 - DNA, 17 bp, Arabidopsis thaliana
gcacccgtggcctaatg

SEQ ID NO: 178091 - DNA, 17 bp, Arabidopsis thaliana
gcacccgttgcctaatg

SEQ ID NO: 178092 - DNA, 17 bp, Arabidopsis thaliana
gcaccctgtagatggat

SEQ ID NO: 178093 - DNA, 17 bp, Arabidopsis thaliana
gcaccgactaccgatgg

SEQ ID NO: 178094 - DNA, 17 bp, Arabidopsis thaliana
gcaccgccaccccattt

SEQ ID NO: 178095 - DNA, 17 bp, Arabidopsis thaliana
gcaccgccctgtcaagg

SEQ ID NO: 178096 - DNA, 17 bp, Arabidopsis thaliana
gcacctcgatgtcggct

SEQ ID NO: 178097 - DNA, 17 bp, Arabidopsis thaliana
gcacctggttgccgaca

SEQ ID NO: 178098 - DNA, 17 bp, Arabidopsis thaliana
gcacctggttgccgacc

SEQ ID NO: 178099 - DNA, 17 bp, Arabidopsis thaliana
gcacctggttgccgacg

SEQ ID NO: 178100 - DNA, 17 bp, Arabidopsis thaliana
gcacctgtagatggatc

SEQ ID NO: 178101 - DNA, 17 bp, Arabidopsis thaliana
gcacgatcgtatgcgga

SEQ ID NO: 178102 - DNA, 17 bp, Arabidopsis thaliana
gcacggctgatgtagga

SEQ ID NO: 178103 - DNA, 17 bp, Arabidopsis thaliana
gcacgggcctggctcaa

SEQ ID NO: 178104 - DNA, 17 bp, Arabidopsis thaliana
gcacgggctcaacccgc

SEQ ID NO: 178105 - DNA, 17 bp, Arabidopsis thaliana
gcacgtctgcctgggtg

SEQ ID NO: 178106 - DNA, 17 bp, Arabidopsis thaliana
gcacgtctgcttgggtg

SEQ ID NO: 178107 - DNA, 17 bp, Arabidopsis thaliana
gcacgtgcattcgtccc

SEQ ID NO: 178108 - DNA, 17 bp, Arabidopsis thaliana
gcacgttagcgctgcca

SEQ ID NO: 178109 - DNA, 17 bp, Arabidopsis thaliana
gcactacgtgacattaa

SEQ ID NO: 178110 - DNA, 17 bp, Arabidopsis thaliana
gcactacgtgacattga

SEQ ID NO: 178111 - DNA, 17 bp, Arabidopsis thaliana
gcactggtccggccggg

SEQ ID NO: 178112 - DNA, 17 bp, Arabidopsis thaliana
gcacttctgcctgggtg

SEQ ID NO: 178113 - DNA, 17 bp, Arabidopsis thaliana
gcagaaacataatcgga

SEQ ID NO: 178114 - DNA, 17 bp, Arabidopsis thaliana
gcagaactggcgatgcg

SEQ ID NO: 178115 - DNA, 17 bp, Arabidopsis thaliana
gcagaatcccgtgaacc

SEQ ID NO: 178116 - DNA, 17 bp, Arabidopsis thaliana
gcagacgggcgagacgg

SEQ ID NO: 178117 - DNA, 17 bp, Arabidopsis thaliana
gcagagggggtttgcgt

SEQ ID NO: 178118 - DNA, 17 bp, Arabidopsis thaliana
gcagatgtttaagttca

SEQ ID NO: 178119 - DNA, 17 bp, Arabidopsis thaliana
gcagcaaggccactctg

SEQ ID NO: 178120 - DNA, 17 bp, Arabidopsis thaliana
gcagcaccattaagaca

SEQ ID NO: 178121 - DNA, 17 bp, Arabidopsis thaliana
gcagcaccattaagact

SEQ ID NO: 178122 - DNA, 17 bp, Arabidopsis thaliana
gcagcaccattaagata

SEQ ID NO: 178123 - DNA, 17 bp, Arabidopsis thaliana
gcagcaccattaagatt

SEQ ID NO: 178124 - DNA, 17 bp, Arabidopsis thaliana
gcagccaaaaccagaaa

SEQ ID NO: 178125 - DNA, 17 bp, Arabidopsis thaliana
gcagccaaaaccagaag

SEQ ID NO: 178126 - DNA, 17 bp, Arabidopsis thaliana
gcagccaagcgttcata

SEQ ID NO: 178127 - DNA, 17 bp, Arabidopsis thaliana
gcagccaaggatgactt

SEQ ID NO: 178128 - DNA, 17 bp, Arabidopsis thaliana
gcagcgtcgaaattacc

SEQ ID NO: 178129 - DNA, 17 bp, Arabidopsis thaliana
gcagcgttggcgacttt

SEQ ID NO: 178130 - DNA, 17 bp, Arabidopsis thaliana
gcagctatggactggtt

SEQ ID NO: 178131 - DNA, 17 bp, Arabidopsis thaliana
gcagctggaagccaatc

SEQ ID NO: 178132 - DNA, 17 bp, Arabidopsis thaliana
gcagcttgtttctgaac

SEQ ID NO: 178133 - DNA, 17 bp, Arabidopsis thaliana
gcaggagacaacttcgg

SEQ ID NO: 178134 - DNA, 17 bp, Arabidopsis thaliana
gcaggctgtcgattttc

SEQ ID NO: 178135 - DNA, 17 bp, Arabidopsis thaliana
gcagggacgtagtcaac

SEQ ID NO: 178136 - DNA, 17 bp, Arabidopsis thaliana
gcagggagctgacctgg

SEQ ID NO: 178137 - DNA, 17 bp, Arabidopsis thaliana
gcagggcggacaggtag

SEQ ID NO: 178138 - DNA, 17 bp, Arabidopsis thaliana
gcaggtctccaaggtga

SEQ ID NO: 178139 - DNA, 17 bp, Arabidopsis thaliana
gcaggtttgcccgagag

SEQ ID NO: 178140 - DNA, 17 bp, Arabidopsis thaliana
gcaggtttgcccgagtg

SEQ ID NO: 178141 - DNA, 17 bp, Arabidopsis thaliana
gcagtcctgctacacag

SEQ ID NO: 178142 - DNA, 17 bp, Arabidopsis thaliana
gcagtcgacggaaagga

SEQ ID NO: 178143 - DNA, 17 bp, Arabidopsis thaliana
gcagtctccttggctat

SEQ ID NO: 178144 - DNA, 17 bp, Arabidopsis thaliana
gcagtgcattcttctag

SEQ ID NO: 178145 - DNA, 17 bp, Arabidopsis thaliana
gcagtggacggatcaca

SEQ ID NO: 178146 - DNA, 17 bp, Arabidopsis thaliana
gcagtggctttgatgag

SEQ ID NO: 178147 - DNA, 17 bp, Arabidopsis thaliana
gcagtgggctgcgccac

SEQ ID NO: 178148 - DNA, 17 bp, Arabidopsis thaliana
gcagttaagcgtgcttg

SEQ ID NO: 178149 - DNA, 17 bp, Arabidopsis thaliana
gcagttgacggaaagga

SEQ ID NO: 178150 - DNA, 17 bp, Arabidopsis thaliana
gcagttgggcaccgtaa

SEQ ID NO: 178151 - DNA, 17 bp, Arabidopsis thaliana
gcagtttcacagtctga

SEQ ID NO: 178152 - DNA, 17 bp, Arabidopsis thaliana
gcataccacggtggggt

SEQ ID NO: 178153 - DNA, 17 bp, Arabidopsis thaliana
gcatacgaccataccca

SEQ ID NO: 178154 - DNA, 17 bp, Arabidopsis thaliana
gcatatctttgccgtct

SEQ ID NO: 178155 - DNA, 17 bp, Arabidopsis thaliana
gcatattgcagtgtcgg

SEQ ID NO: 178156 - DNA, 17 bp, Arabidopsis thaliana
gcatcagcaaaggatgg

SEQ ID NO: 178157 - DNA, 17 bp, Arabidopsis thaliana
gcatcaggtctccaagg

SEQ ID NO: 178158 - DNA, 17 bp, Arabidopsis thaliana
gcatcatcaagattccg

SEQ ID NO: 178159 - DNA, 17 bp, Arabidopsis thaliana
gcatcatcaagattcta

SEQ ID NO: 178160 - DNA, 17 bp, Arabidopsis thaliana
gcatcatcaagattctg

SEQ ID NO: 178161 - DNA, 17 bp, Arabidopsis thaliana
gcatccagggaaacgaa

SEQ ID NO: 178162 - DNA, 17 bp, Arabidopsis thaliana
gcatccggtagatggat

SEQ ID NO: 178163 - DNA, 17 bp, Arabidopsis thaliana
gcatcctacatggatca

SEQ ID NO: 178164 - DNA, 17 bp, Arabidopsis thaliana
gcatcctagatggatca

SEQ ID NO: 178165 - DNA, 17 bp, Arabidopsis thaliana
gcatcctgtagaatgga

SEQ ID NO: 178166 - DNA, 17 bp, Arabidopsis thaliana
gcatcctgtagacggat

SEQ ID NO: 178167 - DNA, 17 bp, Arabidopsis thaliana
gcatcctgtagaggatc

SEQ ID NO: 178168 - DNA, 17 bp, Arabidopsis thaliana
gcatcctgtagatcgat

SEQ ID NO: 178169 - DNA, 17 bp, Arabidopsis thaliana
gcatcctgtagatgaat

SEQ ID NO: 178170 - DNA, 17 bp, Arabidopsis thaliana
gcatcctgtagatgatc

SEQ ID NO: 178171 - DNA, 17 bp, Arabidopsis thaliana
gcatcctgtagatggaa

SEQ ID NO: 178172 - DNA, 17 bp, Arabidopsis thaliana
gcatcctgtagatggac

SEQ ID NO: 178173 - DNA, 17 bp, Arabidopsis thaliana
gcatcctgtagatggat

SEQ ID NO: 178174 - DNA, 17 bp, Arabidopsis thaliana
gcatcctgtagatggct

SEQ ID NO: 178175 - DNA, 17 bp, Arabidopsis thaliana
gcatcctgtagatgggt

SEQ ID NO: 178176 - DNA, 17 bp, Arabidopsis thaliana
gcatcctgtagatggtc

SEQ ID NO: 178177 - DNA, 17 bp, Arabidopsis thaliana
gcatcctgtagatgtat

SEQ ID NO: 178178 - DNA, 17 bp, Arabidopsis thaliana
gcatcctgtagattgat

SEQ ID NO: 178179 - DNA, 17 bp, Arabidopsis thaliana
gcatcctgtagggatca

SEQ ID NO: 178180 - DNA, 17 bp, Arabidopsis thaliana
gcatcctgtaggtggat

SEQ ID NO: 178181 - DNA, 17 bp, Arabidopsis thaliana
gcatcctgtagtggatc

SEQ ID NO: 178182 - DNA, 17 bp, Arabidopsis thaliana
gcatcctgtagttggat

SEQ ID NO: 178183 - DNA, 17 bp, Arabidopsis thaliana
gcatcctgttagatgca

SEQ ID NO: 178184 - DNA, 17 bp, Arabidopsis thaliana
gcatctggtgtagtggt

SEQ ID NO: 178185 - DNA, 17 bp, Arabidopsis thaliana
gcatctgtagatggatc

SEQ ID NO: 178186 - DNA, 17 bp, Arabidopsis thaliana
gcatctgtagtccaacg

SEQ ID NO: 178187 - DNA, 17 bp, Arabidopsis thaliana
gcatctgttttgatcat

SEQ ID NO: 178188 - DNA, 17 bp, Arabidopsis thaliana
gcatgattgtggccggt

SEQ ID NO: 178189 - DNA, 17 bp, Arabidopsis thaliana
gcatgcctgtcgggacc

SEQ ID NO: 178190 - DNA, 17 bp, Arabidopsis thaliana
gcatgcgcccgccgccc

SEQ ID NO: 178191 - DNA, 17 bp, Arabidopsis thaliana
gcatgctgtcgggaccc

SEQ ID NO: 178192 - DNA, 17 bp, Arabidopsis thaliana
gcatgcttgtcgggacc

SEQ ID NO: 178193 - DNA, 17 bp, Arabidopsis thaliana
gcatggccatcacaagc

SEQ ID NO: 178194 - DNA, 17 bp, Arabidopsis thaliana
gcatggccgttcttagt

SEQ ID NO: 178195 - DNA, 17 bp, Arabidopsis thaliana
gcatggcctcgatccat

SEQ ID NO: 178196 - DNA, 17 bp, Arabidopsis thaliana
gcatggcctctgtgctg

SEQ ID NO: 178197 - DNA, 17 bp, Arabidopsis thaliana
gcatggcctgaaaggac

SEQ ID NO: 178198 - DNA, 17 bp, Arabidopsis thaliana
gcattacggtaaacaac

SEQ ID NO: 178199 - DNA, 17 bp, Arabidopsis thaliana
gcattccctgtgttggc

SEQ ID NO: 178200 - DNA, 17 bp, Arabidopsis thaliana
gcattcctgtagatgga

SEQ ID NO: 178201 - DNA, 17 bp, Arabidopsis thaliana
gcattcggccaattgca

SEQ ID NO: 178202 - DNA, 17 bp, Arabidopsis thaliana
gcattctgtagatggat

SEQ ID NO: 178203 - DNA, 17 bp, Arabidopsis thaliana
gcattgcgatggccgga

SEQ ID NO: 178204 - DNA, 17 bp, Arabidopsis thaliana
gcattgcgatggtccct

SEQ ID NO: 178205 - DNA, 17 bp, Arabidopsis thaliana
gcattggatggatgccc

SEQ ID NO: 178206 - DNA, 17 bp, Arabidopsis thaliana
gcattgggcttgttgat

SEQ ID NO: 178207 - DNA, 17 bp, Arabidopsis thaliana
gcattgggggcgcaacg

SEQ ID NO: 178208 - DNA, 17 bp, Arabidopsis thaliana
gcattggtcggcttgtc

SEQ ID NO: 178209 - DNA, 17 bp, Arabidopsis thaliana
gcatttgccaaggatgt

SEQ ID NO: 178210 - DNA, 17 bp, Arabidopsis thaliana
gcattttgcgagtccaa

SEQ ID NO: 178211 - DNA, 17 bp, Arabidopsis thaliana
gccaaaaggccgagaaa

SEQ ID NO: 178212 - DNA, 17 bp, Arabidopsis thaliana
gccaaacaaacggaagc

SEQ ID NO: 178213 - DNA, 17 bp, Arabidopsis thaliana
gccaaactacgacgaga

SEQ ID NO: 178214 - DNA, 17 bp, Arabidopsis thaliana
gccaacgacacgtgcct

SEQ ID NO: 178215 - DNA, 17 bp, Arabidopsis thaliana
gccaacgacatgtgcct

SEQ ID NO: 178216 - DNA, 17 bp, Arabidopsis thaliana
gccaaggatgacttgcc

SEQ ID NO: 178217 - DNA, 17 bp, Arabidopsis thaliana
gccaaggatgttttcat

SEQ ID NO: 178218 - DNA, 17 bp, Arabidopsis thaliana
gccaatgtcagtgtaga

SEQ ID NO: 178219 - DNA, 17 bp, Arabidopsis thaliana
gccacaacagatccgac

SEQ ID NO: 178220 - DNA, 17 bp, Arabidopsis thaliana
gccacaagccagttatc

SEQ ID NO: 178221 - DNA, 17 bp, Arabidopsis thaliana
gccacagcttcggaagc

SEQ ID NO: 178222 - DNA, 17 bp, Arabidopsis thaliana
gccaccatcccaggaca

SEQ ID NO: 178223 - DNA, 17 bp, Arabidopsis thaliana
gccaccatgccagcagc

SEQ ID NO: 178224 - DNA, 17 bp, Arabidopsis thaliana
gccacgatccactgaga

SEQ ID NO: 178225 - DNA, 17 bp, Arabidopsis thaliana
gccagaaacttgaagac

SEQ ID NO: 178226 - DNA, 17 bp, Arabidopsis thaliana
gccagatacgatgggct

SEQ ID NO: 178227 - DNA, 17 bp, Arabidopsis thaliana
gccagcagccgcggtaa

SEQ ID NO: 178228 - DNA, 17 bp, Arabidopsis thaliana
gccagcatcggttttcg

SEQ ID NO: 178229 - DNA, 17 bp, Arabidopsis thaliana
gccaggatttctgctgt

SEQ ID NO: 178230 - DNA, 17 bp, Arabidopsis thaliana
gccagtgagacggtggg

SEQ ID NO: 178231 - DNA, 17 bp, Arabidopsis thaliana
gccagtggcgcgaagct

SEQ ID NO: 178232 - DNA, 17 bp, Arabidopsis thaliana
gccagtgttccaccaac

SEQ ID NO: 178233 - DNA, 17 bp, Arabidopsis thaliana
gccataacctcccggga

SEQ ID NO: 178234 - DNA, 17 bp, Arabidopsis thaliana
gccatagtggttctgag

SEQ ID NO: 178235 - DNA, 17 bp, Arabidopsis thaliana
gccatcttgagattgta

SEQ ID NO: 178236 - DNA, 17 bp, Arabidopsis thaliana
gcccaccctggaaacgg

SEQ ID NO: 178237 - DNA, 17 bp, Arabidopsis thaliana
gcccattctcgattgcc

SEQ ID NO: 178238 - DNA, 17 bp, Arabidopsis thaliana
gccccgaaaatggatgg

SEQ ID NO: 178239 - DNA, 17 bp, Arabidopsis thaliana
gccccgaaaatgggtgg

SEQ ID NO: 178240 - DNA, 17 bp, Arabidopsis thaliana
gcccctgcgcaaggatg

SEQ ID NO: 178241 - DNA, 17 bp, Arabidopsis thaliana
gcccgatctcgagttgc

SEQ ID NO: 178242 - DNA, 17 bp, Arabidopsis thaliana
gcccgcagaagaaacta

SEQ ID NO: 178243 - DNA, 17 bp, Arabidopsis thaliana
gcccgcagaagaaactg

SEQ ID NO: 178244 - DNA, 17 bp, Arabidopsis thaliana
gcccgcagcgatactga

SEQ ID NO: 178245 - DNA, 17 bp, Arabidopsis thaliana
gcccgccgcccgattgc

SEQ ID NO: 178246 - DNA, 17 bp, Arabidopsis thaliana
gcccgcctttctgaacg

SEQ ID NO: 178247 - DNA, 17 bp, Arabidopsis thaliana
gcccgcgcaggttcgaa

SEQ ID NO: 178248 - DNA, 17 bp, Arabidopsis thaliana
gcccgcttagctcagag

SEQ ID NO: 178249 - DNA, 17 bp, Arabidopsis thaliana
gcccgggcggagcggcc

SEQ ID NO: 178250 - DNA, 17 bp, Arabidopsis thaliana
gcccggtaagccgctag

SEQ ID NO: 178251 - DNA, 17 bp, Arabidopsis thaliana
gcccgtatagctcagtg

SEQ ID NO: 178252 - DNA, 17 bp, Arabidopsis thaliana
gcccgtctagctcagtt

SEQ ID NO: 178253 - DNA, 17 bp, Arabidopsis thaliana
gccctaagttccggtgt

SEQ ID NO: 178254 - DNA, 17 bp, Arabidopsis thaliana
gccctagaagcgttgag

SEQ ID NO: 178255 - DNA, 17 bp, Arabidopsis thaliana
gccctatcaactttcga

SEQ ID NO: 178256 - DNA, 17 bp, Arabidopsis thaliana
gccctattagtaggcca

SEQ ID NO: 178257 - DNA, 17 bp, Arabidopsis thaliana
gccctattagtaggccc

SEQ ID NO: 178258 - DNA, 17 bp, Arabidopsis thaliana
gccctgaaaatggattg

SEQ ID NO: 178259 - DNA, 17 bp, Arabidopsis thaliana
gccctgtagatggatca

SEQ ID NO: 178260 - DNA, 17 bp, Arabidopsis thaliana
gcccttagatgttctgg

SEQ ID NO: 178261 - DNA, 17 bp, Arabidopsis thaliana
gcccttatagctcagtg

SEQ ID NO: 178262 - DNA, 17 bp, Arabidopsis thaliana
gcccttcgcgggcggac

SEQ ID NO: 178263 - DNA, 17 bp, Arabidopsis thaliana
gccctttactacaagaa

SEQ ID NO: 178264 - DNA, 17 bp, Arabidopsis thaliana
gccctttgtacacaccg

SEQ ID NO: 178265 - DNA, 17 bp, Arabidopsis thaliana
gccctttgtcgctaaga

SEQ ID NO: 178266 - DNA, 17 bp, Arabidopsis thaliana
gccgaaatccgctaagg

SEQ ID NO: 178267 - DNA, 17 bp, Arabidopsis thaliana
gccgaagcgagccttgg

SEQ ID NO: 178268 - DNA, 17 bp, Arabidopsis thaliana
gccgaagtttccctcag

SEQ ID NO: 178269 - DNA, 17 bp, Arabidopsis thaliana
gccgacagggatcagcg

SEQ ID NO: 178270 - DNA, 17 bp, Arabidopsis thaliana
gccgaccagggatcagc

SEQ ID NO: 178271 - DNA, 17 bp, Arabidopsis thaliana
gccgaccctcagtagga

SEQ ID NO: 178272 - DNA, 17 bp, Arabidopsis thaliana
gccgaccgaagggacaa

SEQ ID NO: 178273 - DNA, 17 bp, Arabidopsis thaliana
gccgacgggttcggaac

SEQ ID NO: 178274 - DNA, 17 bp, Arabidopsis thaliana
gccgactagggatcgga

SEQ ID NO: 178275 - DNA, 17 bp, Arabidopsis thaliana
gccgactagggatcggg

SEQ ID NO: 178276 - DNA, 17 bp, Arabidopsis thaliana
gccgagccagtgttcca

SEQ ID NO: 178277 - DNA, 17 bp, Arabidopsis thaliana
gccgaggagaggaaggt

SEQ ID NO: 178278 - DNA, 17 bp, Arabidopsis thaliana
gccgagggcacgtctgc

SEQ ID NO: 178279 - DNA, 17 bp, Arabidopsis thaliana
gccgataacaggacgct

SEQ ID NO: 178280 - DNA, 17 bp, Arabidopsis thaliana
gccgatacgcgaaacca

SEQ ID NO: 178281 - DNA, 17 bp, Arabidopsis thaliana
gccgatgtttgtgccca

SEQ ID NO: 178282 - DNA, 17 bp, Arabidopsis thaliana
gccgattccttgcccgc

SEQ ID NO: 178283 - DNA, 17 bp, Arabidopsis thaliana
gccgcaggggaggctaa

SEQ ID NO: 178284 - DNA, 17 bp, Arabidopsis thaliana
gccgcccgattgccgac

SEQ ID NO: 178285 - DNA, 17 bp, Arabidopsis thaliana
gccgcccgattgcgacc

SEQ ID NO: 178286 - DNA, 17 bp, Arabidopsis thaliana
gccgcccgcgacgtcgg

SEQ ID NO: 178287 - DNA, 17 bp, Arabidopsis thaliana
gccgcgatccgaacaca

SEQ ID NO: 178288 - DNA, 17 bp, Arabidopsis thaliana
gccgcggtaattccagc

SEQ ID NO: 178289 - DNA, 17 bp, Arabidopsis thaliana
gccgctatggtgaaata

SEQ ID NO: 178290 - DNA, 17 bp, Arabidopsis thaliana
gccgctatggtgaaatt

SEQ ID NO: 178291 - DNA, 17 bp, Arabidopsis thaliana
gccgctcgattgccgac

SEQ ID NO: 178292 - DNA, 17 bp, Arabidopsis thaliana
gccgctttggccgagtg

SEQ ID NO: 178293 - DNA, 17 bp, Arabidopsis thaliana
gccggaccaggcttcat

SEQ ID NO: 178294 - DNA, 17 bp, Arabidopsis thaliana
gccggacgggggacgga

SEQ ID NO: 178295 - DNA, 17 bp, Arabidopsis thaliana
gccggaggcaggtcgcc

SEQ ID NO: 178296 - DNA, 17 bp, Arabidopsis thaliana
gccggaggtagggtcca

SEQ ID NO: 178297 - DNA, 17 bp, Arabidopsis thaliana
gccggatacgaatccga

SEQ ID NO: 178298 - DNA, 17 bp, Arabidopsis thaliana
gccggattcgtcggatc

SEQ ID NO: 178299 - DNA, 17 bp, Arabidopsis thaliana
gccggcaaaccggagac

SEQ ID NO: 178300 - DNA, 17 bp, Arabidopsis thaliana
gccggccggaggacgga

SEQ ID NO: 178301 - DNA, 17 bp, Arabidopsis thaliana
gccggccgggggacgga

SEQ ID NO: 178302 - DNA, 17 bp, Arabidopsis thaliana
gccggccgtgaagggat

SEQ ID NO: 178303 - DNA, 17 bp, Arabidopsis thaliana
gccggcgactcataggc

SEQ ID NO: 178304 - DNA, 17 bp, Arabidopsis thaliana
gccggcttcttagaggg

SEQ ID NO: 178305 - DNA, 17 bp, Arabidopsis thaliana
gccgggaccgcaagatg

SEQ ID NO: 178306 - DNA, 17 bp, Arabidopsis thaliana
gccgggatagctcagtt

SEQ ID NO: 178307 - DNA, 17 bp, Arabidopsis thaliana
gccgggcggatcatcca

SEQ ID NO: 178308 - DNA, 17 bp, Arabidopsis thaliana
gccgggggacaaaggct

SEQ ID NO: 178309 - DNA, 17 bp, Arabidopsis thaliana
gccgggggacggactga

SEQ ID NO: 178310 - DNA, 17 bp, Arabidopsis thaliana
gccgggggacggactgg

SEQ ID NO: 178311 - DNA, 17 bp, Arabidopsis thaliana
gccgggggcaggtcgcc

SEQ ID NO: 178312 - DNA, 17 bp, Arabidopsis thaliana
gccggtccgcctttggt

SEQ ID NO: 178313 - DNA, 17 bp, Arabidopsis thaliana
gccgtcgaaaatgagta

SEQ ID NO: 178314 - DNA, 17 bp, Arabidopsis thaliana
gccgtcttagctcagcg

SEQ ID NO: 178315 - DNA, 17 bp, Arabidopsis thaliana
gccgtcttagctcagta

SEQ ID NO: 178316 - DNA, 17 bp, Arabidopsis thaliana
gccgtcttagctcagtg

SEQ ID NO: 178317 - DNA, 17 bp, Arabidopsis thaliana
gccgtgaagggatgcct

SEQ ID NO: 178318 - DNA, 17 bp, Arabidopsis thaliana
gccgtgatcgtggtctg

SEQ ID NO: 178319 - DNA, 17 bp, Arabidopsis thaliana
gccgtggagacctgggc

SEQ ID NO: 178320 - DNA, 17 bp, Arabidopsis thaliana
gccgtgtgacgacttct

SEQ ID NO: 178321 - DNA, 17 bp, Arabidopsis thaliana
gccgttctctgcagtct

SEQ ID NO: 178322 - DNA, 17 bp, Arabidopsis thaliana
gccgttggggaagaatc

SEQ ID NO: 178323 - DNA, 17 bp, Arabidopsis thaliana
gccgtttaggccaagga

SEQ ID NO: 178324 - DNA, 17 bp, Arabidopsis thaliana
gcctaagctcctactga

SEQ ID NO: 178325 - DNA, 17 bp, Arabidopsis thaliana
gcctaccatggtggtaa

SEQ ID NO: 178326 - DNA, 17 bp, Arabidopsis thaliana
gcctaccgtttggacct

SEQ ID NO: 178327 - DNA, 17 bp, Arabidopsis thaliana
gcctactccgatattcc

SEQ ID NO: 178328 - DNA, 17 bp, Arabidopsis thaliana
gcctagtcgatgtttga

SEQ ID NO: 178329 - DNA, 17 bp, Arabidopsis thaliana
gcctatgcgttgcacta

SEQ ID NO: 178330 - DNA, 17 bp, Arabidopsis thaliana
gcctcatggtgttactg

SEQ ID NO: 178331 - DNA, 17 bp, Arabidopsis thaliana
gcctccgccgcgaataa

SEQ ID NO: 178332 - DNA, 17 bp, Arabidopsis thaliana
gcctccggcgctgttac

SEQ ID NO: 178333 - DNA, 17 bp, Arabidopsis thaliana
gcctccgtagcatagtg

SEQ ID NO: 178334 - DNA, 17 bp, Arabidopsis thaliana
gcctctaagtcagaatc

SEQ ID NO: 178335 - DNA, 17 bp, Arabidopsis thaliana
gcctctaagtcggaatc

SEQ ID NO: 178336 - DNA, 17 bp, Arabidopsis thaliana
gcctctgtgctggcgac

SEQ ID NO: 178337 - DNA, 17 bp, Arabidopsis thaliana
gcctgacctggggtcgc

SEQ ID NO: 178338 - DNA, 17 bp, Arabidopsis thaliana
gcctgactgtgagaccg

SEQ ID NO: 178339 - DNA, 17 bp, Arabidopsis thaliana
gcctgataaggatttgc

SEQ ID NO: 178340 - DNA, 17 bp, Arabidopsis thaliana
gcctgctaactagctac

SEQ ID NO: 178341 - DNA, 17 bp, Arabidopsis thaliana
gcctgctcgatctccct

SEQ ID NO: 178342 - DNA, 17 bp, Arabidopsis thaliana
gcctgctggatctcagc

SEQ ID NO: 178343 - DNA, 17 bp, Arabidopsis thaliana
gcctgcttcttagaggg

SEQ ID NO: 178344 - DNA, 17 bp, Arabidopsis thaliana
gcctgggtgtcacaaaa

SEQ ID NO: 178345 - DNA, 17 bp, Arabidopsis thaliana
gcctggtgttgtgatct

SEQ ID NO: 178346 - DNA, 17 bp, Arabidopsis thaliana
gcctgtcggccaaggtg

SEQ ID NO: 178347 - DNA, 17 bp, Arabidopsis thaliana
gcctgtcgggacccgaa

SEQ ID NO: 178348 - DNA, 17 bp, Arabidopsis thaliana
gccttagtcgcatcctg

SEQ ID NO: 178349 - DNA, 17 bp, Arabidopsis thaliana
gccttccgagcccacta

SEQ ID NO: 178350 - DNA, 17 bp, Arabidopsis thaliana
gccttcgggatcggagt

SEQ ID NO: 178351 - DNA, 17 bp, Arabidopsis thaliana
gccttcttagctcagtg

SEQ ID NO: 178352 - DNA, 17 bp, Arabidopsis thaliana
gccttgggtgcttgctg

SEQ ID NO: 178353 - DNA, 17 bp, Arabidopsis thaliana
gcctttactgagggtcg

SEQ ID NO: 178354 - DNA, 17 bp, Arabidopsis thaliana
gcctttttaatgattaa

SEQ ID NO: 178355 - DNA, 17 bp, Arabidopsis thaliana
gcctttttaatgattag

SEQ ID NO: 178356 - DNA, 17 bp, Arabidopsis thaliana
gcgaaaccacagccaag

SEQ ID NO: 178357 - DNA, 17 bp, Arabidopsis thaliana
gcgaaatgggagcagcc

SEQ ID NO: 178358 - DNA, 17 bp, Arabidopsis thaliana
gcgaagcgaaagagact

SEQ ID NO: 178359 - DNA, 17 bp, Arabidopsis thaliana
gcgaagctaccgtgcgc

SEQ ID NO: 178360 - DNA, 17 bp, Arabidopsis thaliana
gcgaagcttctcggtag

SEQ ID NO: 178361 - DNA, 17 bp, Arabidopsis thaliana
gcgaatgagtcattcat

SEQ ID NO: 178362 - DNA, 17 bp, Arabidopsis thaliana
gcgaccccaggtcaggc

SEQ ID NO: 178363 - DNA, 17 bp, Arabidopsis thaliana
gcgacgatacctcccgc

SEQ ID NO: 178364 - DNA, 17 bp, Arabidopsis thaliana
gcgacgcatgcgcccgc

SEQ ID NO: 178365 - DNA, 17 bp, Arabidopsis thaliana
gcgacgcggattacggt

SEQ ID NO: 178366 - DNA, 17 bp, Arabidopsis thaliana
gcgacgcgggcatcagt

SEQ ID NO: 178367 - DNA, 17 bp, Arabidopsis thaliana
gcgacgtgggtggttcg

SEQ ID NO: 178368 - DNA, 17 bp, Arabidopsis thaliana
gcgagagcgggtcgccg

SEQ ID NO: 178369 - DNA, 17 bp, Arabidopsis thaliana
gcgagaggcacgggcgg

SEQ ID NO: 178370 - DNA, 17 bp, Arabidopsis thaliana
gcgagaggcacggggtt

SEQ ID NO: 178371 - DNA, 17 bp, Arabidopsis thaliana
gcgagtcaacgggtgag

SEQ ID NO: 178372 - DNA, 17 bp, Arabidopsis thaliana
gcgagtccaagcttccg

SEQ ID NO: 178373 - DNA, 17 bp, Arabidopsis thaliana
gcgatactgacgtgcaa

SEQ ID NO: 178374 - DNA, 17 bp, Arabidopsis thaliana
gcgattcttccccaacg

SEQ ID NO: 178375 - DNA, 17 bp, Arabidopsis thaliana
gcgattcttctccaacg

SEQ ID NO: 178376 - DNA, 17 bp, Arabidopsis thaliana
gcgcaagtgaaatacca

SEQ ID NO: 178377 - DNA, 17 bp, Arabidopsis thaliana
gcgcaagtgaaatagca

SEQ ID NO: 178378 - DNA, 17 bp, Arabidopsis thaliana
gcgcatctggtgtagtg

SEQ ID NO: 178379 - DNA, 17 bp, Arabidopsis thaliana
gcgccagtagctcagtg

SEQ ID NO: 178380 - DNA, 17 bp, Arabidopsis thaliana
gcgccgggggcaggtcg

SEQ ID NO: 178381 - DNA, 17 bp, Arabidopsis thaliana
gcgcctaacggcgtgcc

SEQ ID NO: 178382 - DNA, 17 bp, Arabidopsis thaliana
gcgcctgtagctcagtg

SEQ ID NO: 178383 - DNA, 17 bp, Arabidopsis thaliana
gcgcctgtagtccaacg

SEQ ID NO: 178384 - DNA, 17 bp, Arabidopsis thaliana
gcgccttctgcagagcc

SEQ ID NO: 178385 - DNA, 17 bp, Arabidopsis thaliana
gcgcgaacttcgaaagg

SEQ ID NO: 178386 - DNA, 17 bp, Arabidopsis thaliana
gcgcgacctatacccgg

SEQ ID NO: 178387 - DNA, 17 bp, Arabidopsis thaliana
gcgctatccatcctgag

SEQ ID NO: 178388 - DNA, 17 bp, Arabidopsis thaliana
gcgctcttagttcagtt

SEQ ID NO: 178389 - DNA, 17 bp, Arabidopsis thaliana
gcgctgccacggtacct

SEQ ID NO: 178390 - DNA, 17 bp, Arabidopsis thaliana
gcgcttgttcacctctc

SEQ ID NO: 178391 - DNA, 17 bp, Arabidopsis thaliana
gcggaaatagcttaatg

SEQ ID NO: 178392 - DNA, 17 bp, Arabidopsis thaliana
gcggaagcgagaatgtc

SEQ ID NO: 178393 - DNA, 17 bp, Arabidopsis thaliana
gcggaagcgtcgttcgg

SEQ ID NO: 178394 - DNA, 17 bp, Arabidopsis thaliana
gcggaaggatcattgtc

SEQ ID NO: 178395 - DNA, 17 bp, Arabidopsis thaliana
gcggaattacccttact

SEQ ID NO: 178396 - DNA, 17 bp, Arabidopsis thaliana
gcggaggacattgtcag

SEQ ID NO: 178397 - DNA, 17 bp, Arabidopsis thaliana
gcggatcgtgccgacac

SEQ ID NO: 178398 - DNA, 17 bp, Arabidopsis thaliana
gcggatgggggccggcg

SEQ ID NO: 178399 - DNA, 17 bp, Arabidopsis thaliana
gcggatgtagccaagtg

SEQ ID NO: 178400 - DNA, 17 bp, Arabidopsis thaliana
gcggatgttgcttatag

SEQ ID NO: 178401 - DNA, 17 bp, Arabidopsis thaliana
gcggattacggtggcgg

SEQ ID NO: 178402 - DNA, 17 bp, Arabidopsis thaliana
gcggattacgttggcgg

SEQ ID NO: 178403 - DNA, 17 bp, Arabidopsis thaliana
gcgggaagcatttgcac

SEQ ID NO: 178404 - DNA, 17 bp, Arabidopsis thaliana
gcgggatccctcacggg

SEQ ID NO: 178405 - DNA, 17 bp, Arabidopsis thaliana
gcgggatccctcgcggg

SEQ ID NO: 178406 - DNA, 17 bp, Arabidopsis thaliana
gcggggatagctcagat

SEQ ID NO: 178407 - DNA, 17 bp, Arabidopsis thaliana
gcggggatagctcagtt

SEQ ID NO: 178408 - DNA, 17 bp, Arabidopsis thaliana
gcgggtaaacggcggga

SEQ ID NO: 178409 - DNA, 17 bp, Arabidopsis thaliana
gcgggtgacccgagttc

SEQ ID NO: 178410 - DNA, 17 bp, Arabidopsis thaliana
gcgggtgacccgggttc

SEQ ID NO: 178411 - DNA, 17 bp, Arabidopsis thaliana
gcggtaaggcaacgggc

SEQ ID NO: 178412 - DNA, 17 bp, Arabidopsis thaliana
gcggtacttgttcgcta

SEQ ID NO: 178413 - DNA, 17 bp, Arabidopsis thaliana
gcggtccgaacgacgct

SEQ ID NO: 178414 - DNA, 17 bp, Arabidopsis thaliana
gcggttcaataaagctg

SEQ ID NO: 178415 - DNA, 17 bp, Arabidopsis thaliana
gcggttgtatcctccag

SEQ ID NO: 178416 - DNA, 17 bp, Arabidopsis thaliana
gcgtaaagcgtctgtag

SEQ ID NO: 178417 - DNA, 17 bp, Arabidopsis thaliana
gcgtatgaggagccatg

SEQ ID NO: 178418 - DNA, 17 bp, Arabidopsis thaliana
gcgtcctcagcgacgga

SEQ ID NO: 178419 - DNA, 17 bp, Arabidopsis thaliana
gcgtcgccagcacagag

SEQ ID NO: 178420 - DNA, 17 bp, Arabidopsis thaliana
gcgtcgcgatagcaatt

SEQ ID NO: 178421 - DNA, 17 bp, Arabidopsis thaliana
gcgtcgcgatagtaatt

SEQ ID NO: 178422 - DNA, 17 bp, Arabidopsis thaliana
gcgtcgtgctgctaggc

SEQ ID NO: 178423 - DNA, 17 bp, Arabidopsis thaliana
gcgtcgttcggaccgcc

SEQ ID NO: 178424 - DNA, 17 bp, Arabidopsis thaliana
gcgtctgagaaaacgtg

SEQ ID NO: 178425 - DNA, 17 bp, Arabidopsis thaliana
gcgtctgtagctcagtg

SEQ ID NO: 178426 - DNA, 17 bp, Arabidopsis thaliana
gcgtctgtagtccaaat

SEQ ID NO: 178427 - DNA, 17 bp, Arabidopsis thaliana
gcgtctgtagtccaaca

SEQ ID NO: 178428 - DNA, 17 bp, Arabidopsis thaliana
gcgtctgtagtccaacg

SEQ ID NO: 178429 - DNA, 17 bp, Arabidopsis thaliana
gcgtctgtagtccaact

SEQ ID NO: 178430 - DNA, 17 bp, Arabidopsis thaliana
gcgtctgtagtccagcg

SEQ ID NO: 178431 - DNA, 17 bp, Arabidopsis thaliana
gcgtctgtagtccatcg

SEQ ID NO: 178432 - DNA, 17 bp, Arabidopsis thaliana
gcgtgctccgggcgtcg

SEQ ID NO: 178433 - DNA, 17 bp, Arabidopsis thaliana
gcgttagcatccgcagg

SEQ ID NO: 178434 - DNA, 17 bp, Arabidopsis thaliana
gcgttgactacgtccct

SEQ ID NO: 178435 - DNA, 17 bp, Arabidopsis thaliana
gcgtttgcgaaggaggg

SEQ ID NO: 178436 - DNA, 17 bp, Arabidopsis thaliana
gctaaatacgggcgaga

SEQ ID NO: 178437 - DNA, 17 bp, Arabidopsis thaliana
gctaacgcaatgtgatt

SEQ ID NO: 178438 - DNA, 17 bp, Arabidopsis thaliana
gctaagtccgttcggcg

SEQ ID NO: 178439 - DNA, 17 bp, Arabidopsis thaliana
gctaatcggattgacga

SEQ ID NO: 178440 - DNA, 17 bp, Arabidopsis thaliana
gctaatcttctctgtat

SEQ ID NO: 178441 - DNA, 17 bp, Arabidopsis thaliana
gctaatgaggtactaac

SEQ ID NO: 178442 - DNA, 17 bp, Arabidopsis thaliana
gctacaaacgaccgaca

SEQ ID NO: 178443 - DNA, 17 bp, Arabidopsis thaliana
gctacactgatgtattc

SEQ ID NO: 178444 - DNA, 17 bp, Arabidopsis thaliana
gctaccacgatccactg

SEQ ID NO: 178445 - DNA, 17 bp, Arabidopsis thaliana
gctaccgtgcgctggat

SEQ ID NO: 178446 - DNA, 17 bp, Arabidopsis thaliana
gctacgtggaggcatcc

SEQ ID NO: 178447 - DNA, 17 bp, Arabidopsis thaliana
gctagaagcgacgcatg

SEQ ID NO: 178448 - DNA, 17 bp, Arabidopsis thaliana
gctaggcggactacttg

SEQ ID NO: 178449 - DNA, 17 bp, Arabidopsis thaliana
gctagtaatcgcggatc

SEQ ID NO: 178450 - DNA, 17 bp, Arabidopsis thaliana
gctagtgactggagtga

SEQ ID NO: 178451 - DNA, 17 bp, Arabidopsis thaliana
gctagttagcaggctga

SEQ ID NO: 178452 - DNA, 17 bp, Arabidopsis thaliana
gctatacaacaggtgga

SEQ ID NO: 178453 - DNA, 17 bp, Arabidopsis thaliana
gctatgttggacttaga

SEQ ID NO: 178454 - DNA, 17 bp, Arabidopsis thaliana
gctattcgtccaaaacc

SEQ ID NO: 178455 - DNA, 17 bp, Arabidopsis thaliana
gctcaacaagatggaaa

SEQ ID NO: 178456 - DNA, 17 bp, Arabidopsis thaliana
gctcaaccgccgacaaa

SEQ ID NO: 178457 - DNA, 17 bp, Arabidopsis thaliana
gctcaaccgccgacaag

SEQ ID NO: 178458 - DNA, 17 bp, Arabidopsis thaliana
gctcaagaaagctgtgg

SEQ ID NO: 178459 - DNA, 17 bp, Arabidopsis thaliana
gctcaccacatggctgc

SEQ ID NO: 178460 - DNA, 17 bp, Arabidopsis thaliana
gctcacctctctttctg

SEQ ID NO: 178461 - DNA, 17 bp, Arabidopsis thaliana
gctcacgttgactacgt

SEQ ID NO: 178462 - DNA, 17 bp, Arabidopsis thaliana
gctcactctctttgtca

SEQ ID NO: 178463 - DNA, 17 bp, Arabidopsis thaliana
gctcactctctttttgt

SEQ ID NO: 178464 - DNA, 17 bp, Arabidopsis thaliana
gctcactgctctatctg

SEQ ID NO: 178465 - DNA, 17 bp, Arabidopsis thaliana
gctcactgctctttctg

SEQ ID NO: 178466 - DNA, 17 bp, Arabidopsis thaliana
gctcagaactggtacgg

SEQ ID NO: 178467 - DNA, 17 bp, Arabidopsis thaliana
gctcagccggaggtagg

SEQ ID NO: 178468 - DNA, 17 bp, Arabidopsis thaliana
gctcagctgtatttgct

SEQ ID NO: 178469 - DNA, 17 bp, Arabidopsis thaliana
gctcaggcggttcttgc

SEQ ID NO: 178470 - DNA, 17 bp, Arabidopsis thaliana
gctcatgtcttagcgaa

SEQ ID NO: 178471 - DNA, 17 bp, Arabidopsis thaliana
gctcattttgttatttg

SEQ ID NO: 178472 - DNA, 17 bp, Arabidopsis thaliana
gctccaccctgcagcct

SEQ ID NO: 178473 - DNA, 17 bp, Arabidopsis thaliana
gctccaggcgtccttgg

SEQ ID NO: 178474 - DNA, 17 bp, Arabidopsis thaliana
gctcccggcagacgcac

SEQ ID NO: 178475 - DNA, 17 bp, Arabidopsis thaliana
gctcccggtaggacctc

SEQ ID NO: 178476 - DNA, 17 bp, Arabidopsis thaliana
gctccctcataagttgc

SEQ ID NO: 178477 - DNA, 17 bp, Arabidopsis thaliana
gctccctgtatgcctcg

SEQ ID NO: 178478 - DNA, 17 bp, Arabidopsis thaliana
gctcctactgagggccg

SEQ ID NO: 178479 - DNA, 17 bp, Arabidopsis thaliana
gctcctactgagggtcg

SEQ ID NO: 178480 - DNA, 17 bp, Arabidopsis thaliana
gctcctagtaacccccc

SEQ ID NO: 178481 - DNA, 17 bp, Arabidopsis thaliana
gctcgaacccttggaga

SEQ ID NO: 178482 - DNA, 17 bp, Arabidopsis thaliana
gctcgaagacgatcaga

SEQ ID NO: 178483 - DNA, 17 bp, Arabidopsis thaliana
gctcgaagcccatgcct

SEQ ID NO: 178484 - DNA, 17 bp, Arabidopsis thaliana
gctcgagcagtccgctg

SEQ ID NO: 178485 - DNA, 17 bp, Arabidopsis thaliana
gctcgatcctatctttg

SEQ ID NO: 178486 - DNA, 17 bp, Arabidopsis thaliana
gctcgcagtcgtgacag

SEQ ID NO: 178487 - DNA, 17 bp, Arabidopsis thaliana
gctcgcattggtgaatg

SEQ ID NO: 178488 - DNA, 17 bp, Arabidopsis thaliana
gctcgccagatacgatg

SEQ ID NO: 178489 - DNA, 17 bp, Arabidopsis thaliana
gctcgcgttgactacgt

SEQ ID NO: 178490 - DNA, 17 bp, Arabidopsis thaliana
gctcgctaaacaatcct

SEQ ID NO: 178491 - DNA, 17 bp, Arabidopsis thaliana
gctcgggggtcccagct

SEQ ID NO: 178492 - DNA, 17 bp, Arabidopsis thaliana
gctcgggggtcccagtg

SEQ ID NO: 178493 - DNA, 17 bp, Arabidopsis thaliana
gctcgggggtcccagtt

SEQ ID NO: 178494 - DNA, 17 bp, Arabidopsis thaliana
gctcgggggtcccattt

SEQ ID NO: 178495 - DNA, 17 bp, Arabidopsis thaliana
gctcggtgcaggtcggg

SEQ ID NO: 178496 - DNA, 17 bp, Arabidopsis thaliana
gctcgtagttgaacctt

SEQ ID NO: 178497 - DNA, 17 bp, Arabidopsis thaliana
gctcgtgcgtgctcgag

SEQ ID NO: 178498 - DNA, 17 bp, Arabidopsis thaliana
gctcgtggactgcttgg

SEQ ID NO: 178499 - DNA, 17 bp, Arabidopsis thaliana
gctctaagaactagtga

SEQ ID NO: 178500 - DNA, 17 bp, Arabidopsis thaliana
gctctcaccgtcgtgcc

SEQ ID NO: 178501 - DNA, 17 bp, Arabidopsis thaliana
gctctcagcagtggacg

SEQ ID NO: 178502 - DNA, 17 bp, Arabidopsis thaliana
gctctcgtagctcagtt

SEQ ID NO: 178503 - DNA, 17 bp, Arabidopsis thaliana
gctctctatgcttctgt

SEQ ID NO: 178504 - DNA, 17 bp, Arabidopsis thaliana
gctctctatgcttcttt

SEQ ID NO: 178505 - DNA, 17 bp, Arabidopsis thaliana
gctctcttttgattcta

SEQ ID NO: 178506 - DNA, 17 bp, Arabidopsis thaliana
gctctgagggctgggct

SEQ ID NO: 178507 - DNA, 17 bp, Arabidopsis thaliana
gctctgctagcggacta

SEQ ID NO: 178508 - DNA, 17 bp, Arabidopsis thaliana
gctctgctaggcggaca

SEQ ID NO: 178509 - DNA, 17 bp, Arabidopsis thaliana
gctctgctaggcggact

SEQ ID NO: 178510 - DNA, 17 bp, Arabidopsis thaliana
gctctgctaggtggact

SEQ ID NO: 178511 - DNA, 17 bp, Arabidopsis thaliana
gctcttcatcgagaggg

SEQ ID NO: 178512 - DNA, 17 bp, Arabidopsis thaliana
gctcttccagccgctgg

SEQ ID NO: 178513 - DNA, 17 bp, Arabidopsis thaliana
gctcttctcgggtgcgg

SEQ ID NO: 178514 - DNA, 17 bp, Arabidopsis thaliana
gctctttcttgattcta

SEQ ID NO: 178515 - DNA, 17 bp, Arabidopsis thaliana
gctgaaaaatggtgaac

SEQ ID NO: 178516 - DNA, 17 bp, Arabidopsis thaliana
gctgaaagtgactacat

SEQ ID NO: 178517 - DNA, 17 bp, Arabidopsis thaliana
gctgaatgatatcctct

SEQ ID NO: 178518 - DNA, 17 bp, Arabidopsis thaliana
gctgacagccgacgggt

SEQ ID NO: 178519 - DNA, 17 bp, Arabidopsis thaliana
gctgaccggatgtcaaa

SEQ ID NO: 178520 - DNA, 17 bp, Arabidopsis thaliana
gctgacggcggccacca

SEQ ID NO: 178521 - DNA, 17 bp, Arabidopsis thaliana
gctgagccgtttccagg

SEQ ID NO: 178522 - DNA, 17 bp, Arabidopsis thaliana
gctgatacaaagatagt

SEQ ID NO: 178523 - DNA, 17 bp, Arabidopsis thaliana
gctgatgatgctcctgg

SEQ ID NO: 178524 - DNA, 17 bp, Arabidopsis thaliana
gctgatgcgggacggaa

SEQ ID NO: 178525 - DNA, 17 bp, Arabidopsis thaliana
gctgattggtgcagtaa

SEQ ID NO: 178526 - DNA, 17 bp, Arabidopsis thaliana
gctgattggtgcagtat

SEQ ID NO: 178527 - DNA, 17 bp, Arabidopsis thaliana
gctgcatgcgtcaggag

SEQ ID NO: 178528 - DNA, 17 bp, Arabidopsis thaliana
gctgccacgatccactg

SEQ ID NO: 178529 - DNA, 17 bp, Arabidopsis thaliana
gctgccacgatcctctg

SEQ ID NO: 178530 - DNA, 17 bp, Arabidopsis thaliana
gctgccatcttgagatt

SEQ ID NO: 178531 - DNA, 17 bp, Arabidopsis thaliana
gctgccatttgagagcc

SEQ ID NO: 178532 - DNA, 17 bp, Arabidopsis thaliana
gctgcccccgcgtcagc

SEQ ID NO: 178533 - DNA, 17 bp, Arabidopsis thaliana
gctgccgtgatcggcgt

SEQ ID NO: 178534 - DNA, 17 bp, Arabidopsis thaliana
gctgccgtgatcgtggt

SEQ ID NO: 178535 - DNA, 17 bp, Arabidopsis thaliana
gctgccttccttggatg

SEQ ID NO: 178536 - DNA, 17 bp, Arabidopsis thaliana
gctgcggttttgtgtga

SEQ ID NO: 178537 - DNA, 17 bp, Arabidopsis thaliana
gctgctcagctgtattt

SEQ ID NO: 178538 - DNA, 17 bp, Arabidopsis thaliana
gctgcttcagggcgtat

SEQ ID NO: 178539 - DNA, 17 bp, Arabidopsis thaliana
gctgcttctcagacaaa

SEQ ID NO: 178540 - DNA, 17 bp, Arabidopsis thaliana
gctggaatagctcagtt

SEQ ID NO: 178541 - DNA, 17 bp, Arabidopsis thaliana
gctggaattaccgcggc

SEQ ID NO: 178542 - DNA, 17 bp, Arabidopsis thaliana
gctggagattgtgatat

SEQ ID NO: 178543 - DNA, 17 bp, Arabidopsis thaliana
gctggaggatacgtcgc

SEQ ID NO: 178544 - DNA, 17 bp, Arabidopsis thaliana
gctggagtagctcagtt

SEQ ID NO: 178545 - DNA, 17 bp, Arabidopsis thaliana
gctggcaccagacttgc

SEQ ID NO: 178546 - DNA, 17 bp, Arabidopsis thaliana
gctggcaccttatgaga

SEQ ID NO: 178547 - DNA, 17 bp, Arabidopsis thaliana
gctggcaccttatgagg

SEQ ID NO: 178548 - DNA, 17 bp, Arabidopsis thaliana
gctggcgaaagggggat

SEQ ID NO: 178549 - DNA, 17 bp, Arabidopsis thaliana
gctggcgacgcatcatt

SEQ ID NO: 178550 - DNA, 17 bp, Arabidopsis thaliana
gctggggcggcacatct

SEQ ID NO: 178551 - DNA, 17 bp, Arabidopsis thaliana
gctggtccatcatcccc

SEQ ID NO: 178552 - DNA, 17 bp, Arabidopsis thaliana
gctggtgcactccgccc

SEQ ID NO: 178553 - DNA, 17 bp, Arabidopsis thaliana
gctggttcgtttccggc

SEQ ID NO: 178554 - DNA, 17 bp, Arabidopsis thaliana
gctgtatttgctggtca

SEQ ID NO: 178555 - DNA, 17 bp, Arabidopsis thaliana
gctgtccttcgttctcc

SEQ ID NO: 178556 - DNA, 17 bp, Arabidopsis thaliana
gctgtctacgagtcggg

SEQ ID NO: 178557 - DNA, 17 bp, Arabidopsis thaliana
gctgtgatcaccggttt

SEQ ID NO: 178558 - DNA, 17 bp, Arabidopsis thaliana
gctgtgcgaaagggtcc

SEQ ID NO: 178559 - DNA, 17 bp, Arabidopsis thaliana
gctgtgcgtatcgaccc

SEQ ID NO: 178560 - DNA, 17 bp, Arabidopsis thaliana
gctgtggatcccaagaa

SEQ ID NO: 178561 - DNA, 17 bp, Arabidopsis thaliana
gctgtggttccgtcaca

SEQ ID NO: 178562 - DNA, 17 bp, Arabidopsis thaliana
gctgtggttttgattga

SEQ ID NO: 178563 - DNA, 17 bp, Arabidopsis thaliana
gctgttaactgattggt

SEQ ID NO: 178564 - DNA, 17 bp, Arabidopsis thaliana
gctgttgacttattcac

SEQ ID NO: 178565 - DNA, 17 bp, Arabidopsis thaliana
gctgttgatgaaacgac

SEQ ID NO: 178566 - DNA, 17 bp, Arabidopsis thaliana
gcttaatttgactcaac

SEQ ID NO: 178567 - DNA, 17 bp, Arabidopsis thaliana
gcttacagcagtggacg

SEQ ID NO: 178568 - DNA, 17 bp, Arabidopsis thaliana
gcttaccagtaaacgaa

SEQ ID NO: 178569 - DNA, 17 bp, Arabidopsis thaliana
gcttacgcgacttacgg

SEQ ID NO: 178570 - DNA, 17 bp, Arabidopsis thaliana
gcttaggtagaccgtct

SEQ ID NO: 178571 - DNA, 17 bp, Arabidopsis thaliana
gcttagtcgcatcctgt

SEQ ID NO: 178572 - DNA, 17 bp, Arabidopsis thaliana
gcttagtggaaagacga

SEQ ID NO: 178573 - DNA, 17 bp, Arabidopsis thaliana
gcttatcaactttcgac

SEQ ID NO: 178574 - DNA, 17 bp, Arabidopsis thaliana
gcttatgcggcctacct

SEQ ID NO: 178575 - DNA, 17 bp, Arabidopsis thaliana
gcttatgtggcctacct

SEQ ID NO: 178576 - DNA, 17 bp, Arabidopsis thaliana
gcttattattttgtttg

SEQ ID NO: 178577 - DNA, 17 bp, Arabidopsis thaliana
gcttcggcgggtcgatg

SEQ ID NO: 178578 - DNA, 17 bp, Arabidopsis thaliana
gcttctaccgcaagagt

SEQ ID NO: 178579 - DNA, 17 bp, Arabidopsis thaliana
gcttctagcccggattc

SEQ ID NO: 178580 - DNA, 17 bp, Arabidopsis thaliana
gcttctatgggttgtgt

SEQ ID NO: 178581 - DNA, 17 bp, Arabidopsis thaliana
gcttctggactgcttgg

SEQ ID NO: 178582 - DNA, 17 bp, Arabidopsis thaliana
gcttcttcctttccctt

SEQ ID NO: 178583 - DNA, 17 bp, Arabidopsis thaliana
gcttgacattagtccga

SEQ ID NO: 178584 - DNA, 17 bp, Arabidopsis thaliana
gcttgactcaggcggat

SEQ ID NO: 178585 - DNA, 17 bp, Arabidopsis thaliana
gcttgactctagtccga

SEQ ID NO: 178586 - DNA, 17 bp, Arabidopsis thaliana
gcttgactctggtccga

SEQ ID NO: 178587 - DNA, 17 bp, Arabidopsis thaliana
gcttgagtacggtaggg

SEQ ID NO: 178588 - DNA, 17 bp, Arabidopsis thaliana
gcttgattctagtccga

SEQ ID NO: 178589 - DNA, 17 bp, Arabidopsis thaliana
gcttgcagagagaaatc

SEQ ID NO: 178590 - DNA, 17 bp, Arabidopsis thaliana
gcttggaagaggtctcg

SEQ ID NO: 178591 - DNA, 17 bp, Arabidopsis thaliana
gcttggcagaatcagcg

SEQ ID NO: 178592 - DNA, 17 bp, Arabidopsis thaliana
gcttggctgccacaggg

SEQ ID NO: 178593 - DNA, 17 bp, Arabidopsis thaliana
gcttggcttgcgagagg

SEQ ID NO: 178594 - DNA, 17 bp, Arabidopsis thaliana
gcttggcttgcgagatg

SEQ ID NO: 178595 - DNA, 17 bp, Arabidopsis thaliana
gcttgggccgtggtggg

SEQ ID NO: 178596 - DNA, 17 bp, Arabidopsis thaliana
gcttggggtgcgagagg

SEQ ID NO: 178597 - DNA, 17 bp, Arabidopsis thaliana
gcttgggtgaaactaag

SEQ ID NO: 178598 - DNA, 17 bp, Arabidopsis thaliana
gcttggtgcaggtcggg

SEQ ID NO: 178599 - DNA, 17 bp, Arabidopsis thaliana
gcttgtcccaaagatta

SEQ ID NO: 178600 - DNA, 17 bp, Arabidopsis thaliana
gcttgtcccttcggtcg

SEQ ID NO: 178601 - DNA, 17 bp, Arabidopsis thaliana
gcttgtcctcgggtccg

SEQ ID NO: 178602 - DNA, 17 bp, Arabidopsis thaliana
gcttgtctcaaagatta

SEQ ID NO: 178603 - DNA, 17 bp, Arabidopsis thaliana
gcttgtgaactgcttgg

SEQ ID NO: 178604 - DNA, 17 bp, Arabidopsis thaliana
gcttgtggactgcttcg

SEQ ID NO: 178605 - DNA, 17 bp, Arabidopsis thaliana
gcttgtggactgcttgg

SEQ ID NO: 178606 - DNA, 17 bp, Arabidopsis thaliana
gcttgtggactgtttgg

SEQ ID NO: 178607 - DNA, 17 bp, Arabidopsis thaliana
gcttgtggctgcttggt

SEQ ID NO: 178608 - DNA, 17 bp, Arabidopsis thaliana
gcttgtgggctgcttgg

SEQ ID NO: 178609 - DNA, 17 bp, Arabidopsis thaliana
gcttgtggtctgcttgg

SEQ ID NO: 178610 - DNA, 17 bp, Arabidopsis thaliana
gctttcagacaccgact

SEQ ID NO: 178611 - DNA, 17 bp, Arabidopsis thaliana
gctttcatagctcagtt

SEQ ID NO: 178612 - DNA, 17 bp, Arabidopsis thaliana
gctttgcctgcgcaggt

SEQ ID NO: 178613 - DNA, 17 bp, Arabidopsis thaliana
gctttgcggaggcggtc

SEQ ID NO: 178614 - DNA, 17 bp, Arabidopsis thaliana
gctttggccgagtggca

SEQ ID NO: 178615 - DNA, 17 bp, Arabidopsis thaliana
gctttggccgagtggcc

SEQ ID NO: 178616 - DNA, 17 bp, Arabidopsis thaliana
gctttggccgagtggtg

SEQ ID NO: 178617 - DNA, 17 bp, Arabidopsis thaliana
gctttggccgagtggtt

SEQ ID NO: 178618 - DNA, 17 bp, Arabidopsis thaliana
gctttggtggatcactg

SEQ ID NO: 178619 - DNA, 17 bp, Arabidopsis thaliana
gcttttaccatctcggc

SEQ ID NO: 178620 - DNA, 17 bp, Arabidopsis thaliana
gcttttcaaaagacgtt

SEQ ID NO: 178621 - DNA, 17 bp, Arabidopsis thaliana
gcttttctcgacgagtc

SEQ ID NO: 178622 - DNA, 17 bp, Arabidopsis thaliana
gcttttgctttgccggg

SEQ ID NO: 178623 - DNA, 17 bp, Arabidopsis thaliana
gctttttgtcgctaaga

SEQ ID NO: 178624 - DNA, 17 bp, Arabidopsis thaliana
ggaaaaccccattcata

SEQ ID NO: 178625 - DNA, 17 bp, Arabidopsis thaliana
ggaaaaggattggctct

SEQ ID NO: 178626 - DNA, 17 bp, Arabidopsis thaliana
ggaaaagtttccattgg

SEQ ID NO: 178627 - DNA, 17 bp, Arabidopsis thaliana
ggaaaatagaggctgat

SEQ ID NO: 178628 - DNA, 17 bp, Arabidopsis thaliana
ggaaacagtcgacgagc

SEQ ID NO: 178629 - DNA, 17 bp, Arabidopsis thaliana
ggaaacggctcagccgg

SEQ ID NO: 178630 - DNA, 17 bp, Arabidopsis thaliana
ggaaacggctgctaata

SEQ ID NO: 178631 - DNA, 17 bp, Arabidopsis thaliana
ggaaactctggtggaag

SEQ ID NO: 178632 - DNA, 17 bp, Arabidopsis thaliana
ggaaacttaccaggtcc

SEQ ID NO: 178633 - DNA, 17 bp, Arabidopsis thaliana
ggaaagccgtgctatac

SEQ ID NO: 178634 - DNA, 17 bp, Arabidopsis thaliana
ggaaagctcgaaccctt

SEQ ID NO: 178635 - DNA, 17 bp, Arabidopsis thaliana
ggaaaggcttacggtgg

SEQ ID NO: 178636 - DNA, 17 bp, Arabidopsis thaliana
ggaaaggtatttcaaca

SEQ ID NO: 178637 - DNA, 17 bp, Arabidopsis thaliana
ggaaaggtgaaaagaac

SEQ ID NO: 178638 - DNA, 17 bp, Arabidopsis thaliana
ggaaataggagtggcac

SEQ ID NO: 178639 - DNA, 17 bp, Arabidopsis thaliana
ggaacaaaataaggaat

SEQ ID NO: 178640 - DNA, 17 bp, Arabidopsis thaliana
ggaacaaggtagccgta

SEQ ID NO: 178641 - DNA, 17 bp, Arabidopsis thaliana
ggaacatgtagcagttg

SEQ ID NO: 178642 - DNA, 17 bp, Arabidopsis thaliana
ggaaccgctgttgagtg

SEQ ID NO: 178643 - DNA, 17 bp, Arabidopsis thaliana
ggaacctctccgtttta

SEQ ID NO: 178644 - DNA, 17 bp, Arabidopsis thaliana
ggaacctgcggaaggat

SEQ ID NO: 178645 - DNA, 17 bp, Arabidopsis thaliana
ggaacgactccgccgcc

SEQ ID NO: 178646 - DNA, 17 bp, Arabidopsis thaliana
ggaacgggcttggcaga

SEQ ID NO: 178647 - DNA, 17 bp, Arabidopsis thaliana
ggaacgggtatctcggg

SEQ ID NO: 178648 - DNA, 17 bp, Arabidopsis thaliana
ggaacgggtcgagggga

SEQ ID NO: 178649 - DNA, 17 bp, Arabidopsis thaliana
ggaacgttctgtcaatc

SEQ ID NO: 178650 - DNA, 17 bp, Arabidopsis thaliana
ggaactcaaccgcctct

SEQ ID NO: 178651 - DNA, 17 bp, Arabidopsis thaliana
ggaactcaaccgcttct

SEQ ID NO: 178652 - DNA, 17 bp, Arabidopsis thaliana
ggaactccgagaccgag

SEQ ID NO: 178653 - DNA, 17 bp, Arabidopsis thaliana
ggaactgggacccccga

SEQ ID NO: 178654 - DNA, 17 bp, Arabidopsis thaliana
ggaacttacccgacaag

SEQ ID NO: 178655 - DNA, 17 bp, Arabidopsis thaliana
ggaacttcgatattatc

SEQ ID NO: 178656 - DNA, 17 bp, Arabidopsis thaliana
ggaacttttacgcgaat

SEQ ID NO: 178657 - DNA, 17 bp, Arabidopsis thaliana
ggaacttttttgtagac

SEQ ID NO: 178658 - DNA, 17 bp, Arabidopsis thaliana
ggaagaaaactttctgg

SEQ ID NO: 178659 - DNA, 17 bp, Arabidopsis thaliana
ggaagaaactatctcac

SEQ ID NO: 178660 - DNA, 17 bp, Arabidopsis thaliana
ggaagaagcttagaaat

SEQ ID NO: 178661 - DNA, 17 bp, Arabidopsis thaliana
ggaagataggacgcata

SEQ ID NO: 178662 - DNA, 17 bp, Arabidopsis thaliana
ggaagattttgccatcc

SEQ ID NO: 178663 - DNA, 17 bp, Arabidopsis thaliana
ggaagcaggcggcggag

SEQ ID NO: 178664 - DNA, 17 bp, Arabidopsis thaliana
ggaagcccgcagcgata

SEQ ID NO: 178665 - DNA, 17 bp, Arabidopsis thaliana
ggaagccctgcctgaag

SEQ ID NO: 178666 - DNA, 17 bp, Arabidopsis thaliana
ggaagcgactcgcgtgg

SEQ ID NO: 178667 - DNA, 17 bp, Arabidopsis thaliana
ggaagcgactcgcgttg

SEQ ID NO: 178668 - DNA, 17 bp, Arabidopsis thaliana
ggaagcgtcgttcggac

SEQ ID NO: 178669 - DNA, 17 bp, Arabidopsis thaliana
ggaaggacctttttctc

SEQ ID NO: 178670 - DNA, 17 bp, Arabidopsis thaliana
ggaaggatcattctcga

SEQ ID NO: 178671 - DNA, 17 bp, Arabidopsis thaliana
ggaaggatcattgtcga

SEQ ID NO: 178672 - DNA, 17 bp, Arabidopsis thaliana
ggaaggatcattgtttc

SEQ ID NO: 178673 - DNA, 17 bp, Arabidopsis thaliana
ggaaggcagcaggcgcg

SEQ ID NO: 178674 - DNA, 17 bp, Arabidopsis thaliana
ggaaggtgcggctggat

SEQ ID NO: 178675 - DNA, 17 bp, Arabidopsis thaliana
ggaagtcctcgtgttgc

SEQ ID NO: 178676 - DNA, 17 bp, Arabidopsis thaliana
ggaagtcggcaaaatgg

SEQ ID NO: 178677 - DNA, 17 bp, Arabidopsis thaliana
ggaagttgctatgcggc

SEQ ID NO: 178678 - DNA, 17 bp, Arabidopsis thaliana
ggaataaaaggaccggc

SEQ ID NO: 178679 - DNA, 17 bp, Arabidopsis thaliana
ggaatattgttgtgacc

SEQ ID NO: 178680 - DNA, 17 bp, Arabidopsis thaliana
ggaatcgaaccctaatg

SEQ ID NO: 178681 - DNA, 17 bp, Arabidopsis thaliana
ggaatctctctgatgca

SEQ ID NO: 178682 - DNA, 17 bp, Arabidopsis thaliana
ggaatcttgaagatgct

SEQ ID NO: 178683 - DNA, 17 bp, Arabidopsis thaliana
ggaatcttgatgatgca

SEQ ID NO: 178684 - DNA, 17 bp, Arabidopsis thaliana
ggaatcttgatgatgcc

SEQ ID NO: 178685 - DNA, 17 bp, Arabidopsis thaliana
ggaatcttgatgatgcg

SEQ ID NO: 178686 - DNA, 17 bp, Arabidopsis thaliana
ggaatcttgatgatgct

SEQ ID NO: 178687 - DNA, 17 bp, Arabidopsis thaliana
ggaatcttgatgatgtc

SEQ ID NO: 178688 - DNA, 17 bp, Arabidopsis thaliana
ggaatcttggtgatgct

SEQ ID NO: 178689 - DNA, 17 bp, Arabidopsis thaliana
ggaatgcttctgattca

SEQ ID NO: 178690 - DNA, 17 bp, Arabidopsis thaliana
ggaatgtagtggccagc

SEQ ID NO: 178691 - DNA, 17 bp, Arabidopsis thaliana
ggaatgttgtctggatc

SEQ ID NO: 178692 - DNA, 17 bp, Arabidopsis thaliana
ggaatgttgtctggatg

SEQ ID NO: 178693 - DNA, 17 bp, Arabidopsis thaliana
ggaatgttgtctggttg

SEQ ID NO: 178694 - DNA, 17 bp, Arabidopsis thaliana
ggaattaccgcggctgc

SEQ ID NO: 178695 - DNA, 17 bp, Arabidopsis thaliana
ggaattgacggaagggc

SEQ ID NO: 178696 - DNA, 17 bp, Arabidopsis thaliana
ggaattttgatgatgct

SEQ ID NO: 178697 - DNA, 17 bp, Arabidopsis thaliana
ggacaactccagctcag

SEQ ID NO: 178698 - DNA, 17 bp, Arabidopsis thaliana
ggacaaggggaatccga

SEQ ID NO: 178699 - DNA, 17 bp, Arabidopsis thaliana
ggacaatatttgcacag

SEQ ID NO: 178700 - DNA, 17 bp, Arabidopsis thaliana
ggacacgtctgcctggg

SEQ ID NO: 178701 - DNA, 17 bp, Arabidopsis thaliana
ggacagattggagttaa

SEQ ID NO: 178702 - DNA, 17 bp, Arabidopsis thaliana
ggacagtcgaccggcca

SEQ ID NO: 178703 - DNA, 17 bp, Arabidopsis thaliana
ggacagtcgaccggcta

SEQ ID NO: 178704 - DNA, 17 bp, Arabidopsis thaliana
ggacagtcgggggcatt

SEQ ID NO: 178705 - DNA, 17 bp, Arabidopsis thaliana
ggacataatgggtgcac

SEQ ID NO: 178706 - DNA, 17 bp, Arabidopsis thaliana
ggacattgtcaggtggg

SEQ ID NO: 178707 - DNA, 17 bp, Arabidopsis thaliana
ggaccaaggagtctgac

SEQ ID NO: 178708 - DNA, 17 bp, Arabidopsis thaliana
ggaccaggctattcccc

SEQ ID NO: 178709 - DNA, 17 bp, Arabidopsis thaliana
ggaccaggcttcatccc

SEQ ID NO: 178710 - DNA, 17 bp, Arabidopsis thaliana
ggaccaggcttcattca

SEQ ID NO: 178711 - DNA, 17 bp, Arabidopsis thaliana
ggaccaggcttcattcc

SEQ ID NO: 178712 - DNA, 17 bp, Arabidopsis thaliana
ggaccattgcggttgtg

SEQ ID NO: 178713 - DNA, 17 bp, Arabidopsis thaliana
ggaccatttctcgattt

SEQ ID NO: 178714 - DNA, 17 bp, Arabidopsis thaliana
ggacccgaaagatggtg

SEQ ID NO: 178715 - DNA, 17 bp, Arabidopsis thaliana
ggacccggtcgatgaag

SEQ ID NO: 178716 - DNA, 17 bp, Arabidopsis thaliana
ggaccgacgcggattac

SEQ ID NO: 178717 - DNA, 17 bp, Arabidopsis thaliana
ggaccgagtgccgctca

SEQ ID NO: 178718 - DNA, 17 bp, Arabidopsis thaliana
ggaccgtccctcctcct

SEQ ID NO: 178719 - DNA, 17 bp, Arabidopsis thaliana
ggaccgtgtccgcgaca

SEQ ID NO: 178720 - DNA, 17 bp, Arabidopsis thaliana
ggacgagccaccatcca

SEQ ID NO: 178721 - DNA, 17 bp, Arabidopsis thaliana
ggacgagccaccatccc

SEQ ID NO: 178722 - DNA, 17 bp, Arabidopsis thaliana
ggacgcttgttaggatc

SEQ ID NO: 178723 - DNA, 17 bp, Arabidopsis thaliana
ggacggactgggaacgg

SEQ ID NO: 178724 - DNA, 17 bp, Arabidopsis thaliana
ggacggaggaggctagg

SEQ ID NO: 178725 - DNA, 17 bp, Arabidopsis thaliana
ggacggatgagctttgg

SEQ ID NO: 178726 - DNA, 17 bp, Arabidopsis thaliana
ggacgggaagtggtgtt

SEQ ID NO: 178727 - DNA, 17 bp, Arabidopsis thaliana
ggacgtaagatctgttg

SEQ ID NO: 178728 - DNA, 17 bp, Arabidopsis thaliana
ggacgtagtcaacgcga

SEQ ID NO: 178729 - DNA, 17 bp, Arabidopsis thaliana
ggacgtggcggttgacg

SEQ ID NO: 178730 - DNA, 17 bp, Arabidopsis thaliana
ggactatgaatggggtt

SEQ ID NO: 178731 - DNA, 17 bp, Arabidopsis thaliana
ggactcgaccctgatga

SEQ ID NO: 178732 - DNA, 17 bp, Arabidopsis thaliana
ggactcgcaaaatgcag

SEQ ID NO: 178733 - DNA, 17 bp, Arabidopsis thaliana
ggactcggaggtggtgg

SEQ ID NO: 178734 - DNA, 17 bp, Arabidopsis thaliana
ggactcgtatacttcgg

SEQ ID NO: 178735 - DNA, 17 bp, Arabidopsis thaliana
ggactgcccagactccc

SEQ ID NO: 178736 - DNA, 17 bp, Arabidopsis thaliana
ggactgctgtctggctc

SEQ ID NO: 178737 - DNA, 17 bp, Arabidopsis thaliana
ggactgggaacggctct

SEQ ID NO: 178738 - DNA, 17 bp, Arabidopsis thaliana
ggactgggcagcccgga

SEQ ID NO: 178739 - DNA, 17 bp, Arabidopsis thaliana
ggactgtcgtctggctc

SEQ ID NO: 178740 - DNA, 17 bp, Arabidopsis thaliana
ggactgttctggctcga

SEQ ID NO: 178741 - DNA, 17 bp, Arabidopsis thaliana
ggactgttgtccggctg

SEQ ID NO: 178742 - DNA, 17 bp, Arabidopsis thaliana
ggactgttgtctggcta

SEQ ID NO: 178743 - DNA, 17 bp, Arabidopsis thaliana
ggactgttgtctggctc

SEQ ID NO: 178744 - DNA, 17 bp, Arabidopsis thaliana
ggactgttgtctggctg

SEQ ID NO: 178745 - DNA, 17 bp, Arabidopsis thaliana
ggactgttgtctggctt

SEQ ID NO: 178746 - DNA, 17 bp, Arabidopsis thaliana
ggactgttgttcggctg

SEQ ID NO: 178747 - DNA, 17 bp, Arabidopsis thaliana
ggactgttgtttggctc

SEQ ID NO: 178748 - DNA, 17 bp, Arabidopsis thaliana
ggactgttgtttggctg

SEQ ID NO: 178749 - DNA, 17 bp, Arabidopsis thaliana
ggacttagccaacgaca

SEQ ID NO: 178750 - DNA, 17 bp, Arabidopsis thaliana
ggacttagccaacggat

SEQ ID NO: 178751 - DNA, 17 bp, Arabidopsis thaliana
ggacttgaaatcctttt

SEQ ID NO: 178752 - DNA, 17 bp, Arabidopsis thaliana
ggacttgatctacctga

SEQ ID NO: 178753 - DNA, 17 bp, Arabidopsis thaliana
ggacttgtcgcaatggc

SEQ ID NO: 178754 - DNA, 17 bp, Arabidopsis thaliana
ggacttgtgggagtcgg

SEQ ID NO: 178755 - DNA, 17 bp, Arabidopsis thaliana
ggacttgtgggagttgg

SEQ ID NO: 178756 - DNA, 17 bp, Arabidopsis thaliana
ggagaaagactcggcaa

SEQ ID NO: 178757 - DNA, 17 bp, Arabidopsis thaliana
ggagaagccaatatgaa

SEQ ID NO: 178758 - DNA, 17 bp, Arabidopsis thaliana
ggagaagcggttgagtt

SEQ ID NO: 178759 - DNA, 17 bp, Arabidopsis thaliana
ggagaagcggttgggtt

SEQ ID NO: 178760 - DNA, 17 bp, Arabidopsis thaliana
ggagaatctgatgtccc

SEQ ID NO: 178761 - DNA, 17 bp, Arabidopsis thaliana
ggagaattagggttcga

SEQ ID NO: 178762 - DNA, 17 bp, Arabidopsis thaliana
ggagacatggtccaagc

SEQ ID NO: 178763 - DNA, 17 bp, Arabidopsis thaliana
ggagaccatccacatga

SEQ ID NO: 178764 - DNA, 17 bp, Arabidopsis thaliana
ggagacccgggttcgtt

SEQ ID NO: 178765 - DNA, 17 bp, Arabidopsis thaliana
ggagaccgcagcttcga

SEQ ID NO: 178766 - DNA, 17 bp, Arabidopsis thaliana
ggagaccgcgtgaggca

SEQ ID NO: 178767 - DNA, 17 bp, Arabidopsis thaliana
ggagacctgggctcgta

SEQ ID NO: 178768 - DNA, 17 bp, Arabidopsis thaliana
ggagacggcggcgggga

SEQ ID NO: 178769 - DNA, 17 bp, Arabidopsis thaliana
ggagactcagatctgca

SEQ ID NO: 178770 - DNA, 17 bp, Arabidopsis thaliana
ggagactgcagagatta

SEQ ID NO: 178771 - DNA, 17 bp, Arabidopsis thaliana
ggagagatggccgagta

SEQ ID NO: 178772 - DNA, 17 bp, Arabidopsis thaliana
ggagagatggccgagtg

SEQ ID NO: 178773 - DNA, 17 bp, Arabidopsis thaliana
ggagagatggctgagta

SEQ ID NO: 178774 - DNA, 17 bp, Arabidopsis thaliana
ggagagatggctgagtg

SEQ ID NO: 178775 - DNA, 17 bp, Arabidopsis thaliana
ggagataggagtggcac

SEQ ID NO: 178776 - DNA, 17 bp, Arabidopsis thaliana
ggagattctttcagtcc

SEQ ID NO: 178777 - DNA, 17 bp, Arabidopsis thaliana
ggagcatcatcaagatt

SEQ ID NO: 178778 - DNA, 17 bp, Arabidopsis thaliana
ggagcccacaggccgac

SEQ ID NO: 178779 - DNA, 17 bp, Arabidopsis thaliana
ggagctggaattaccga

SEQ ID NO: 178780 - DNA, 17 bp, Arabidopsis thaliana
ggagcttgctttgacgc

SEQ ID NO: 178781 - DNA, 17 bp, Arabidopsis thaliana
ggagctttccccgggcg

SEQ ID NO: 178782 - DNA, 17 bp, Arabidopsis thaliana
ggaggaggaagtatgcg

SEQ ID NO: 178783 - DNA, 17 bp, Arabidopsis thaliana
ggaggaggtggcggaat

SEQ ID NO: 178784 - DNA, 17 bp, Arabidopsis thaliana
ggaggcaatggccatac

SEQ ID NO: 178785 - DNA, 17 bp, Arabidopsis thaliana
ggaggcagcggttcatc

SEQ ID NO: 178786 - DNA, 17 bp, Arabidopsis thaliana
ggaggcatcccttcacg

SEQ ID NO: 178787 - DNA, 17 bp, Arabidopsis thaliana
ggaggcggggtacaacc

SEQ ID NO: 178788 - DNA, 17 bp, Arabidopsis thaliana
ggagggaaccagctaat

SEQ ID NO: 178789 - DNA, 17 bp, Arabidopsis thaliana
ggagggacggcggtcgg

SEQ ID NO: 178790 - DNA, 17 bp, Arabidopsis thaliana
ggagggacggtccttgg

SEQ ID NO: 178791 - DNA, 17 bp, Arabidopsis thaliana
ggagggcaagtctggtg

SEQ ID NO: 178792 - DNA, 17 bp, Arabidopsis thaliana
ggagggcaatgcgtgag

SEQ ID NO: 178793 - DNA, 17 bp, Arabidopsis thaliana
ggagggcaggtctggtg

SEQ ID NO: 178794 - DNA, 17 bp, Arabidopsis thaliana
ggagggcgcggcggtca

SEQ ID NO: 178795 - DNA, 17 bp, Arabidopsis thaliana
ggagggcgcggcggtcg

SEQ ID NO: 178796 - DNA, 17 bp, Arabidopsis thaliana
ggagggcgcggtggtcg

SEQ ID NO: 178797 - DNA, 17 bp, Arabidopsis thaliana
ggaggggaccactatgg

SEQ ID NO: 178798 - DNA, 17 bp, Arabidopsis thaliana
ggaggtcgcagtgacca

SEQ ID NO: 178799 - DNA, 17 bp, Arabidopsis thaliana
ggaggtcggtaagccaa

SEQ ID NO: 178800 - DNA, 17 bp, Arabidopsis thaliana
ggaggtgatgacaattt

SEQ ID NO: 178801 - DNA, 17 bp, Arabidopsis thaliana
ggaggtgtgcgaaggta

SEQ ID NO: 178802 - DNA, 17 bp, Arabidopsis thaliana
ggaggttgctaacggcc

SEQ ID NO: 178803 - DNA, 17 bp, Arabidopsis thaliana
ggagtaactatgactct

SEQ ID NO: 178804 - DNA, 17 bp, Arabidopsis thaliana
ggagtaggcgaacggac

SEQ ID NO: 178805 - DNA, 17 bp, Arabidopsis thaliana
ggagtatggtcgcaagg

SEQ ID NO: 178806 - DNA, 17 bp, Arabidopsis thaliana
ggagtcccgttcgaaag

SEQ ID NO: 178807 - DNA, 17 bp, Arabidopsis thaliana
ggagtcgtcattttgca

SEQ ID NO: 178808 - DNA, 17 bp, Arabidopsis thaliana
ggagtctgacatgtgtg

SEQ ID NO: 178809 - DNA, 17 bp, Arabidopsis thaliana
ggagtgacccatgattg

SEQ ID NO: 178810 - DNA, 17 bp, Arabidopsis thaliana
ggagtggacgctcatca

SEQ ID NO: 178811 - DNA, 17 bp, Arabidopsis thaliana
ggagtggcaccgtgggt

SEQ ID NO: 178812 - DNA, 17 bp, Arabidopsis thaliana
ggagttcattgccacaa

SEQ ID NO: 178813 - DNA, 17 bp, Arabidopsis thaliana
ggagttcattgccacat

SEQ ID NO: 178814 - DNA, 17 bp, Arabidopsis thaliana
ggagtttgctgaagcgg

SEQ ID NO: 178815 - DNA, 17 bp, Arabidopsis thaliana
ggagtttggctggggcg

SEQ ID NO: 178816 - DNA, 17 bp, Arabidopsis thaliana
ggataaccgtagtaatt

SEQ ID NO: 178817 - DNA, 17 bp, Arabidopsis thaliana
ggatacggtggtggtgg

SEQ ID NO: 178818 - DNA, 17 bp, Arabidopsis thaliana
ggatagaatcctttgca

SEQ ID NO: 178819 - DNA, 17 bp, Arabidopsis thaliana
ggatagctggagctcgg

SEQ ID NO: 178820 - DNA, 17 bp, Arabidopsis thaliana
ggatcagcggatgttgc

SEQ ID NO: 178821 - DNA, 17 bp, Arabidopsis thaliana
ggatcaggaaacagtta

SEQ ID NO: 178822 - DNA, 17 bp, Arabidopsis thaliana
ggatcaggagcgcagca

SEQ ID NO: 178823 - DNA, 17 bp, Arabidopsis thaliana
ggatcatactgaccagc

SEQ ID NO: 178824 - DNA, 17 bp, Arabidopsis thaliana
ggatcatctgccgactc

SEQ ID NO: 178825 - DNA, 17 bp, Arabidopsis thaliana
ggatcatgatatttgta

SEQ ID NO: 178826 - DNA, 17 bp, Arabidopsis thaliana
ggatcccgtccgctctc

SEQ ID NO: 178827 - DNA, 17 bp, Arabidopsis thaliana
ggatccgcatccgtaga

SEQ ID NO: 178828 - DNA, 17 bp, Arabidopsis thaliana
ggatccgcatcctgtag

SEQ ID NO: 178829 - DNA, 17 bp, Arabidopsis thaliana
ggatccgcatctgtaga

SEQ ID NO: 178830 - DNA, 17 bp, Arabidopsis thaliana
ggatccgggcggaggcg

SEQ ID NO: 178831 - DNA, 17 bp, Arabidopsis thaliana
ggatccgtagcgcaatg

SEQ ID NO: 178832 - DNA, 17 bp, Arabidopsis thaliana
ggatccgtggcgcaatg

SEQ ID NO: 178833 - DNA, 17 bp, Arabidopsis thaliana
ggatccgttgcgcaatg

SEQ ID NO: 178834 - DNA, 17 bp, Arabidopsis thaliana
ggatccttagtcgcatc

SEQ ID NO: 178835 - DNA, 17 bp, Arabidopsis thaliana
ggatcgcatcctgtaga

SEQ ID NO: 178836 - DNA, 17 bp, Arabidopsis thaliana
ggatcgtaacctggctc

SEQ ID NO: 178837 - DNA, 17 bp, Arabidopsis thaliana
ggatcgtggcagcaagg

SEQ ID NO: 178838 - DNA, 17 bp, Arabidopsis thaliana
ggatcgttaccccgcat

SEQ ID NO: 178839 - DNA, 17 bp, Arabidopsis thaliana
ggatctaaacattgtcc

SEQ ID NO: 178840 - DNA, 17 bp, Arabidopsis thaliana
ggatctacgaccccagg

SEQ ID NO: 178841 - DNA, 17 bp, Arabidopsis thaliana
ggatctacttttccaca

SEQ ID NO: 178842 - DNA, 17 bp, Arabidopsis thaliana
ggatctagtcaacgaga

SEQ ID NO: 178843 - DNA, 17 bp, Arabidopsis thaliana
ggatctagtcgcatcct

SEQ ID NO: 178844 - DNA, 17 bp, Arabidopsis thaliana
ggatctcccaaatgtag

SEQ ID NO: 178845 - DNA, 17 bp, Arabidopsis thaliana
ggatctcggaccaggca

SEQ ID NO: 178846 - DNA, 17 bp, Arabidopsis thaliana
ggatctcgtggttgtat

SEQ ID NO: 178847 - DNA, 17 bp, Arabidopsis thaliana
ggatctctcaggtgtcg

SEQ ID NO: 178848 - DNA, 17 bp, Arabidopsis thaliana
ggatctctggagaagcg

SEQ ID NO: 178849 - DNA, 17 bp, Arabidopsis thaliana
ggatctgagaaaatccg

SEQ ID NO: 178850 - DNA, 17 bp, Arabidopsis thaliana
ggatctgagccaaggat

SEQ ID NO: 178851 - DNA, 17 bp, Arabidopsis thaliana
ggatctgcgggaagcat

SEQ ID NO: 178852 - DNA, 17 bp, Arabidopsis thaliana
ggatctggcttggtgaa

SEQ ID NO: 178853 - DNA, 17 bp, Arabidopsis thaliana
ggatctgtaaaggccag

SEQ ID NO: 178854 - DNA, 17 bp, Arabidopsis thaliana
ggatctgtgttctcagg

SEQ ID NO: 178855 - DNA, 17 bp, Arabidopsis thaliana
ggatctgttgtggcatt

SEQ ID NO: 178856 - DNA, 17 bp, Arabidopsis thaliana
ggatcttcacaattcaa

SEQ ID NO: 178857 - DNA, 17 bp, Arabidopsis thaliana
ggatcttccacagcttt

SEQ ID NO: 178858 - DNA, 17 bp, Arabidopsis thaliana
ggatcttcgaggcctat

SEQ ID NO: 178859 - DNA, 17 bp, Arabidopsis thaliana
ggatcttcgttgtctgt

SEQ ID NO: 178860 - DNA, 17 bp, Arabidopsis thaliana
ggatcttcttcagctgc

SEQ ID NO: 178861 - DNA, 17 bp, Arabidopsis thaliana
ggatctttagtcacttt

SEQ ID NO: 178862 - DNA, 17 bp, Arabidopsis thaliana
ggatctttggattgaag

SEQ ID NO: 178863 - DNA, 17 bp, Arabidopsis thaliana
ggatctttttggaattt

SEQ ID NO: 178864 - DNA, 17 bp, Arabidopsis thaliana
ggatgacccgggttcgt

SEQ ID NO: 178865 - DNA, 17 bp, Arabidopsis thaliana
ggatgagctttggtggg

SEQ ID NO: 178866 - DNA, 17 bp, Arabidopsis thaliana
ggatgatcagccacaca

SEQ ID NO: 178867 - DNA, 17 bp, Arabidopsis thaliana
ggatgatgagggacgaa

SEQ ID NO: 178868 - DNA, 17 bp, Arabidopsis thaliana
ggatgatgagggacgac

SEQ ID NO: 178869 - DNA, 17 bp, Arabidopsis thaliana
ggatgatggactaattg

SEQ ID NO: 178870 - DNA, 17 bp, Arabidopsis thaliana
ggatgcgatcataccag

SEQ ID NO: 178871 - DNA, 17 bp, Arabidopsis thaliana
ggatgcggaaaagttgt

SEQ ID NO: 178872 - DNA, 17 bp, Arabidopsis thaliana
ggatgctaacgcaatgt

SEQ ID NO: 178873 - DNA, 17 bp, Arabidopsis thaliana
ggatggatgtctgagcg

SEQ ID NO: 178874 - DNA, 17 bp, Arabidopsis thaliana
ggatggcagtttgcttc

SEQ ID NO: 178875 - DNA, 17 bp, Arabidopsis thaliana
ggatggtagaaacatag

SEQ ID NO: 178876 - DNA, 17 bp, Arabidopsis thaliana
ggatggtagaaagatcc

SEQ ID NO: 178877 - DNA, 17 bp, Arabidopsis thaliana
ggatggtgagggacgaa

SEQ ID NO: 178878 - DNA, 17 bp, Arabidopsis thaliana
ggatggtgagggacgac

SEQ ID NO: 178879 - DNA, 17 bp, Arabidopsis thaliana
ggatggtgaggggcgac

SEQ ID NO: 178880 - DNA, 17 bp, Arabidopsis thaliana
ggatggttgtgaaaggt

SEQ ID NO: 178881 - DNA, 17 bp, Arabidopsis thaliana
ggatgtacagatagggg

SEQ ID NO: 178882 - DNA, 17 bp, Arabidopsis thaliana
ggatgtcagcggttcga

SEQ ID NO: 178883 - DNA, 17 bp, Arabidopsis thaliana
ggatgttcctcgggaga

SEQ ID NO: 178884 - DNA, 17 bp, Arabidopsis thaliana
ggatgttgcttatagga

SEQ ID NO: 178885 - DNA, 17 bp, Arabidopsis thaliana
ggatgttttcagcttcg

SEQ ID NO: 178886 - DNA, 17 bp, Arabidopsis thaliana
ggattaaataagatttt

SEQ ID NO: 178887 - DNA, 17 bp, Arabidopsis thaliana
ggattaacgagattccc

SEQ ID NO: 178888 - DNA, 17 bp, Arabidopsis thaliana
ggattacggtggcggcc

SEQ ID NO: 178889 - DNA, 17 bp, Arabidopsis thaliana
ggattacggtggcggcg

SEQ ID NO: 178890 - DNA, 17 bp, Arabidopsis thaliana
ggattatgactgaacga

SEQ ID NO: 178891 - DNA, 17 bp, Arabidopsis thaliana
ggattcacagtggaccg

SEQ ID NO: 178892 - DNA, 17 bp, Arabidopsis thaliana
ggattccacaactccgg

SEQ ID NO: 178893 - DNA, 17 bp, Arabidopsis thaliana
ggattccgggtaggacc

SEQ ID NO: 178894 - DNA, 17 bp, Arabidopsis thaliana
ggattcgagccggtacc

SEQ ID NO: 178895 - DNA, 17 bp, Arabidopsis thaliana
ggattcgcgtcacacgt

SEQ ID NO: 178896 - DNA, 17 bp, Arabidopsis thaliana
ggattcgtatccggcgt

SEQ ID NO: 178897 - DNA, 17 bp, Arabidopsis thaliana
ggattcgtccgtcttct

SEQ ID NO: 178898 - DNA, 17 bp, Arabidopsis thaliana
ggattcgtccgtcttga

SEQ ID NO: 178899 - DNA, 17 bp, Arabidopsis thaliana
ggattcgtggcgcaatg

SEQ ID NO: 178900 - DNA, 17 bp, Arabidopsis thaliana
ggattctacccgccgct

SEQ ID NO: 178901 - DNA, 17 bp, Arabidopsis thaliana
ggattctcagattgctg

SEQ ID NO: 178902 - DNA, 17 bp, Arabidopsis thaliana
ggattgaagaggacttg

SEQ ID NO: 178903 - DNA, 17 bp, Arabidopsis thaliana
ggattgaaggtcgcgat

SEQ ID NO: 178904 - DNA, 17 bp, Arabidopsis thaliana
ggattgacagactgaga

SEQ ID NO: 178905 - DNA, 17 bp, Arabidopsis thaliana
ggattggctctgagggc

SEQ ID NO: 178906 - DNA, 17 bp, Arabidopsis thaliana
ggatttaccgtccctcc

SEQ ID NO: 178907 - DNA, 17 bp, Arabidopsis thaliana
ggatttatgaaagacga

SEQ ID NO: 178908 - DNA, 17 bp, Arabidopsis thaliana
ggatttatgaaagacta

SEQ ID NO: 178909 - DNA, 17 bp, Arabidopsis thaliana
ggatttcgatcctattg

SEQ ID NO: 178910 - DNA, 17 bp, Arabidopsis thaliana
ggatttgccatggctgc

SEQ ID NO: 178911 - DNA, 17 bp, Arabidopsis thaliana
ggattttgttttcgggg

SEQ ID NO: 178912 - DNA, 17 bp, Arabidopsis thaliana
ggatttttttcataagg

SEQ ID NO: 178913 - DNA, 17 bp, Arabidopsis thaliana
ggatttttttcgatgct

SEQ ID NO: 178914 - DNA, 17 bp, Arabidopsis thaliana
ggatttttttcttaaat

SEQ ID NO: 178915 - DNA, 17 bp, Arabidopsis thaliana
ggcaaaactccaaacca

SEQ ID NO: 178916 - DNA, 17 bp, Arabidopsis thaliana
ggcaaaatggatccgta

SEQ ID NO: 178917 - DNA, 17 bp, Arabidopsis thaliana
ggcaaattgtccttggc

SEQ ID NO: 178918 - DNA, 17 bp, Arabidopsis thaliana
ggcaacggatatctcgg

SEQ ID NO: 178919 - DNA, 17 bp, Arabidopsis thaliana
ggcaacggatatcttgg

SEQ ID NO: 178920 - DNA, 17 bp, Arabidopsis thaliana
ggcaagaacgagcagta

SEQ ID NO: 178921 - DNA, 17 bp, Arabidopsis thaliana
ggcaagaaggaggcgtt

SEQ ID NO: 178922 - DNA, 17 bp, Arabidopsis thaliana
ggcaagatggccgagcg

SEQ ID NO: 178923 - DNA, 17 bp, Arabidopsis thaliana
ggcaagatggccgagtt

SEQ ID NO: 178924 - DNA, 17 bp, Arabidopsis thaliana
ggcaagttgaccttggc

SEQ ID NO: 178925 - DNA, 17 bp, Arabidopsis thaliana
ggcaagttgactttggc

SEQ ID NO: 178926 - DNA, 17 bp, Arabidopsis thaliana
ggcaagttgtccttcgg

SEQ ID NO: 178927 - DNA, 17 bp, Arabidopsis thaliana
ggcaagttgtccttggc

SEQ ID NO: 178928 - DNA, 17 bp, Arabidopsis thaliana
ggcaataacaggtctgt

SEQ ID NO: 178929 - DNA, 17 bp, Arabidopsis thaliana
ggcaatagaaccggtga

SEQ ID NO: 178930 - DNA, 17 bp, Arabidopsis thaliana
ggcaatcgggcggatcc

SEQ ID NO: 178931 - DNA, 17 bp, Arabidopsis thaliana
ggcaatcgggcggcagg

SEQ ID NO: 178932 - DNA, 17 bp, Arabidopsis thaliana
ggcaatcgggcggcgga

SEQ ID NO: 178933 - DNA, 17 bp, Arabidopsis thaliana
ggcaatcgggcggcggg

SEQ ID NO: 178934 - DNA, 17 bp, Arabidopsis thaliana
ggcaatcgggctgcggg

SEQ ID NO: 178935 - DNA, 17 bp, Arabidopsis thaliana
ggcacagctgtgatcac

SEQ ID NO: 178936 - DNA, 17 bp, Arabidopsis thaliana
ggcaccgtaacccggct

SEQ ID NO: 178937 - DNA, 17 bp, Arabidopsis thaliana
ggcacctcgatgtcggc

SEQ ID NO: 178938 - DNA, 17 bp, Arabidopsis thaliana
ggcacgtctgcctgggt

SEQ ID NO: 178939 - DNA, 17 bp, Arabidopsis thaliana
ggcacgtctgctcgggt

SEQ ID NO: 178940 - DNA, 17 bp, Arabidopsis thaliana
ggcactctgcctgggtg

SEQ ID NO: 178941 - DNA, 17 bp, Arabidopsis thaliana
ggcagaacccaaatggc

SEQ ID NO: 178942 - DNA, 17 bp, Arabidopsis thaliana
ggcagagatgcggatcg

SEQ ID NO: 178943 - DNA, 17 bp, Arabidopsis thaliana
ggcagagcccgcgtcga

SEQ ID NO: 178944 - DNA, 17 bp, Arabidopsis thaliana
ggcagagttcgcgtcga

SEQ ID NO: 178945 - DNA, 17 bp, Arabidopsis thaliana
ggcagatccaaggaccg

SEQ ID NO: 178946 - DNA, 17 bp, Arabidopsis thaliana
ggcagatccaaggaggt

SEQ ID NO: 178947 - DNA, 17 bp, Arabidopsis thaliana
ggcagatgaagacccag

SEQ ID NO: 178948 - DNA, 17 bp, Arabidopsis thaliana
ggcagatgtagccaagt

SEQ ID NO: 178949 - DNA, 17 bp, Arabidopsis thaliana
ggcagcaacaggacggt

SEQ ID NO: 178950 - DNA, 17 bp, Arabidopsis thaliana
ggcagcaaggccactca

SEQ ID NO: 178951 - DNA, 17 bp, Arabidopsis thaliana
ggcagcaaggccactct

SEQ ID NO: 178952 - DNA, 17 bp, Arabidopsis thaliana
ggcagcggacctacgta

SEQ ID NO: 178953 - DNA, 17 bp, Arabidopsis thaliana
ggcagcggacctacgtt

SEQ ID NO: 178954 - DNA, 17 bp, Arabidopsis thaliana
ggcagcggggattcgac

SEQ ID NO: 178955 - DNA, 17 bp, Arabidopsis thaliana
ggcagcggttcatcgat

SEQ ID NO: 178956 - DNA, 17 bp, Arabidopsis thaliana
ggcaggaattccacagg

SEQ ID NO: 178957 - DNA, 17 bp, Arabidopsis thaliana
ggcagggctagtgactg

SEQ ID NO: 178958 - DNA, 17 bp, Arabidopsis thaliana
ggcaggttgtccttcgg

SEQ ID NO: 178959 - DNA, 17 bp, Arabidopsis thaliana
ggcagtctcctcggccg

SEQ ID NO: 178960 - DNA, 17 bp, Arabidopsis thaliana
ggcagtctccttggcta

SEQ ID NO: 178961 - DNA, 17 bp, Arabidopsis thaliana
ggcagtctctttggcta

SEQ ID NO: 178962 - DNA, 17 bp, Arabidopsis thaliana
ggcagtctttttggcta

SEQ ID NO: 178963 - DNA, 17 bp, Arabidopsis thaliana
ggcagtgatgaacgaga

SEQ ID NO: 178964 - DNA, 17 bp, Arabidopsis thaliana
ggcagtgctgacggcgg

SEQ ID NO: 178965 - DNA, 17 bp, Arabidopsis thaliana
ggcatcctatagatgga

SEQ ID NO: 178966 - DNA, 17 bp, Arabidopsis thaliana
ggcatcttgatgatgct

SEQ ID NO: 178967 - DNA, 17 bp, Arabidopsis thaliana
ggcatgggaggcggtgg

SEQ ID NO: 178968 - DNA, 17 bp, Arabidopsis thaliana
ggccaagggacagtctc

SEQ ID NO: 178969 - DNA, 17 bp, Arabidopsis thaliana
ggccagaaggcttgggg

SEQ ID NO: 178970 - DNA, 17 bp, Arabidopsis thaliana
ggccagaccggtgtcca

SEQ ID NO: 178971 - DNA, 17 bp, Arabidopsis thaliana
ggccagccaggcccaca

SEQ ID NO: 178972 - DNA, 17 bp, Arabidopsis thaliana
ggccagccaggccgacc

SEQ ID NO: 178973 - DNA, 17 bp, Arabidopsis thaliana
ggccagccaggccgatc

SEQ ID NO: 178974 - DNA, 17 bp, Arabidopsis thaliana
ggccagccaggcgatca

SEQ ID NO: 178975 - DNA, 17 bp, Arabidopsis thaliana
ggccagccaggcgatcc

SEQ ID NO: 178976 - DNA, 17 bp, Arabidopsis thaliana
ggcccacgggtcggatc

SEQ ID NO: 178977 - DNA, 17 bp, Arabidopsis thaliana
ggcccattagctcagtt

SEQ ID NO: 178978 - DNA, 17 bp, Arabidopsis thaliana
ggccccggaactcatca

SEQ ID NO: 178979 - DNA, 17 bp, Arabidopsis thaliana
ggcccgatcatccaatt

SEQ ID NO: 178980 - DNA, 17 bp, Arabidopsis thaliana
ggcccgtctgcctgggt

SEQ ID NO: 178981 - DNA, 17 bp, Arabidopsis thaliana
ggccctgcaggaatcgg

SEQ ID NO: 178982 - DNA, 17 bp, Arabidopsis thaliana
ggccctgcaggctatag

SEQ ID NO: 178983 - DNA, 17 bp, Arabidopsis thaliana
ggccgacaggcccgggt

SEQ ID NO: 178984 - DNA, 17 bp, Arabidopsis thaliana
ggccgacccatcccaag

SEQ ID NO: 178985 - DNA, 17 bp, Arabidopsis thaliana
ggccgacgcggattacg

SEQ ID NO: 178986 - DNA, 17 bp, Arabidopsis thaliana
ggccgagagcacgtctg

SEQ ID NO: 178987 - DNA, 17 bp, Arabidopsis thaliana
ggccgagggcacgtctg

SEQ ID NO: 178988 - DNA, 17 bp, Arabidopsis thaliana
ggccgagggcacgtttg

SEQ ID NO: 178989 - DNA, 17 bp, Arabidopsis thaliana
ggccggcgatgcgtcct

SEQ ID NO: 178990 - DNA, 17 bp, Arabidopsis thaliana
ggccgggggacggacgg

SEQ ID NO: 178991 - DNA, 17 bp, Arabidopsis thaliana
ggccggtccgcctttgg

SEQ ID NO: 178992 - DNA, 17 bp, Arabidopsis thaliana
ggccgtcggggcaagag

SEQ ID NO: 178993 - DNA, 17 bp, Arabidopsis thaliana
ggccgtcggtgcagatc

SEQ ID NO: 178994 - DNA, 17 bp, Arabidopsis thaliana
ggccgtgaaaggatgcc

SEQ ID NO: 178995 - DNA, 17 bp, Arabidopsis thaliana
ggccgtgaagggatgcc

SEQ ID NO: 178996 - DNA, 17 bp, Arabidopsis thaliana
ggccgttcgtaccaatg

SEQ ID NO: 178997 - DNA, 17 bp, Arabidopsis thaliana
ggcctaaatccgagcca

SEQ ID NO: 178998 - DNA, 17 bp, Arabidopsis thaliana
ggcctaagttccctgga

SEQ ID NO: 178999 - DNA, 17 bp, Arabidopsis thaliana
ggcctacgaatgtggtt

SEQ ID NO: 179000 - DNA, 17 bp, Arabidopsis thaliana
ggcctaggctagtgact

SEQ ID NO: 179001 - DNA, 17 bp, Arabidopsis thaliana
ggcctatcgatccttta

SEQ ID NO: 179002 - DNA, 17 bp, Arabidopsis thaliana
ggcctattagctcagta

SEQ ID NO: 179003 - DNA, 17 bp, Arabidopsis thaliana
ggcctattagctcagtt

SEQ ID NO: 179004 - DNA, 17 bp, Arabidopsis thaliana
ggcctctgtgctggcga

SEQ ID NO: 179005 - DNA, 17 bp, Arabidopsis thaliana
ggcctgcatacagggtt

SEQ ID NO: 179006 - DNA, 17 bp, Arabidopsis thaliana
ggccttcgcgggacggg

SEQ ID NO: 179007 - DNA, 17 bp, Arabidopsis thaliana
ggccttgggtgcttgct

SEQ ID NO: 179008 - DNA, 17 bp, Arabidopsis thaliana
ggccttttgcatgtaaa

SEQ ID NO: 179009 - DNA, 17 bp, Arabidopsis thaliana
ggcgaacctgcggaagg

SEQ ID NO: 179010 - DNA, 17 bp, Arabidopsis thaliana
ggcgacaggtctggcat

SEQ ID NO: 179011 - DNA, 17 bp, Arabidopsis thaliana
ggcgacgtgggtggttc

SEQ ID NO: 179012 - DNA, 17 bp, Arabidopsis thaliana
ggcgacttttccggcca

SEQ ID NO: 179013 - DNA, 17 bp, Arabidopsis thaliana
ggcgagagaccgatagc

SEQ ID NO: 179014 - DNA, 17 bp, Arabidopsis thaliana
ggcgagcgtggatgtca

SEQ ID NO: 179015 - DNA, 17 bp, Arabidopsis thaliana
ggcgaggacattgtcag

SEQ ID NO: 179016 - DNA, 17 bp, Arabidopsis thaliana
ggcgataaccccgccgg

SEQ ID NO: 179017 - DNA, 17 bp, Arabidopsis thaliana
ggcgatgcgggatgaac

SEQ ID NO: 179018 - DNA, 17 bp, Arabidopsis thaliana
ggcgatgcgtcctggtc

SEQ ID NO: 179019 - DNA, 17 bp, Arabidopsis thaliana
ggcgattgtgacgaaat

SEQ ID NO: 179020 - DNA, 17 bp, Arabidopsis thaliana
ggcgcacttcgattggg

SEQ ID NO: 179021 - DNA, 17 bp, Arabidopsis thaliana
ggcgccaaagagggtga

SEQ ID NO: 179022 - DNA, 17 bp, Arabidopsis thaliana
ggcgctgctggtgtagt

SEQ ID NO: 179023 - DNA, 17 bp, Arabidopsis thaliana
ggcgctgtctacgagtc

SEQ ID NO: 179024 - DNA, 17 bp, Arabidopsis thaliana
ggcgctgtgaactgtaa

SEQ ID NO: 179025 - DNA, 17 bp, Arabidopsis thaliana
ggcgcttagggcatata

SEQ ID NO: 179026 - DNA, 17 bp, Arabidopsis thaliana
ggcgcttgttcacctct

SEQ ID NO: 179027 - DNA, 17 bp, Arabidopsis thaliana
ggcggaagcgtcgttcg

SEQ ID NO: 179028 - DNA, 17 bp, Arabidopsis thaliana
ggcggactgcttgatct

SEQ ID NO: 179029 - DNA, 17 bp, Arabidopsis thaliana
ggcggagcgatttgtct

SEQ ID NO: 179030 - DNA, 17 bp, Arabidopsis thaliana
ggcggaggacattgtca

SEQ ID NO: 179031 - DNA, 17 bp, Arabidopsis thaliana
ggcggagtggtcggctt

SEQ ID NO: 179032 - DNA, 17 bp, Arabidopsis thaliana
ggcggatgtagccaact

SEQ ID NO: 179033 - DNA, 17 bp, Arabidopsis thaliana
ggcggatgtagccaaga

SEQ ID NO: 179034 - DNA, 17 bp, Arabidopsis thaliana
ggcggatgtagccaagt

SEQ ID NO: 179035 - DNA, 17 bp, Arabidopsis thaliana
ggcggcattggtggagg

SEQ ID NO: 179036 - DNA, 17 bp, Arabidopsis thaliana
ggcggcgaaccattcac

SEQ ID NO: 179037 - DNA, 17 bp, Arabidopsis thaliana
ggcggcgcgaccgagca

SEQ ID NO: 179038 - DNA, 17 bp, Arabidopsis thaliana
ggcggcggtagacgcga

SEQ ID NO: 179039 - DNA, 17 bp, Arabidopsis thaliana
ggcgggagtaactatga

SEQ ID NO: 179040 - DNA, 17 bp, Arabidopsis thaliana
ggcgggatccctcgcgg

SEQ ID NO: 179041 - DNA, 17 bp, Arabidopsis thaliana
ggcggtctgacaggttc

SEQ ID NO: 179042 - DNA, 17 bp, Arabidopsis thaliana
ggcggtgaccaccagtt

SEQ ID NO: 179043 - DNA, 17 bp, Arabidopsis thaliana
ggcggtgtgtacaaagg

SEQ ID NO: 179044 - DNA, 17 bp, Arabidopsis thaliana
ggcgtcctaccagatcc

SEQ ID NO: 179045 - DNA, 17 bp, Arabidopsis thaliana
ggcgtcctaccgattca

SEQ ID NO: 179046 - DNA, 17 bp, Arabidopsis thaliana
ggcgtcgctcagaacca

SEQ ID NO: 179047 - DNA, 17 bp, Arabidopsis thaliana
ggcgtgctcggctaggg

SEQ ID NO: 179048 - DNA, 17 bp, Arabidopsis thaliana
ggcgtgcttgtggactg

SEQ ID NO: 179049 - DNA, 17 bp, Arabidopsis thaliana
ggcgtggaccgacgcgg

SEQ ID NO: 179050 - DNA, 17 bp, Arabidopsis thaliana
ggcgtgggttcatccca

SEQ ID NO: 179051 - DNA, 17 bp, Arabidopsis thaliana
ggcgtgtgaccagatgt

SEQ ID NO: 179052 - DNA, 17 bp, Arabidopsis thaliana
ggcgttttcaggaacta

SEQ ID NO: 179053 - DNA, 17 bp, Arabidopsis thaliana
ggcgttttcaggaactt

SEQ ID NO: 179054 - DNA, 17 bp, Arabidopsis thaliana
ggctaaatacgggcgag

SEQ ID NO: 179055 - DNA, 17 bp, Arabidopsis thaliana
ggctaagtccgttcggc

SEQ ID NO: 179056 - DNA, 17 bp, Arabidopsis thaliana
ggctacgtccaggagcg

SEQ ID NO: 179057 - DNA, 17 bp, Arabidopsis thaliana
ggctactcccaaacata

SEQ ID NO: 179058 - DNA, 17 bp, Arabidopsis thaliana
ggctcccaaaggcacgt

SEQ ID NO: 179059 - DNA, 17 bp, Arabidopsis thaliana
ggctccccattcgaccc

SEQ ID NO: 179060 - DNA, 17 bp, Arabidopsis thaliana
ggctcccggcagacgca

SEQ ID NO: 179061 - DNA, 17 bp, Arabidopsis thaliana
ggctcccggtaggacct

SEQ ID NO: 179062 - DNA, 17 bp, Arabidopsis thaliana
ggctcgacgccaggatg

SEQ ID NO: 179063 - DNA, 17 bp, Arabidopsis thaliana
ggctcgagggtcccagt

SEQ ID NO: 179064 - DNA, 17 bp, Arabidopsis thaliana
ggctcggatgggagtac

SEQ ID NO: 179065 - DNA, 17 bp, Arabidopsis thaliana
ggctctgtgattgcttc

SEQ ID NO: 179066 - DNA, 17 bp, Arabidopsis thaliana
ggctcttcccggttcgc

SEQ ID NO: 179067 - DNA, 17 bp, Arabidopsis thaliana
ggctgagccgtttccag

SEQ ID NO: 179068 - DNA, 17 bp, Arabidopsis thaliana
ggctgatgttgtgatct

SEQ ID NO: 179069 - DNA, 17 bp, Arabidopsis thaliana
ggctgcagcggcggcgg

SEQ ID NO: 179070 - DNA, 17 bp, Arabidopsis thaliana
ggctgcggaaggatcat

SEQ ID NO: 179071 - DNA, 17 bp, Arabidopsis thaliana
ggctgctggcaccagac

SEQ ID NO: 179072 - DNA, 17 bp, Arabidopsis thaliana
ggctggggcggcacatc

SEQ ID NO: 179073 - DNA, 17 bp, Arabidopsis thaliana
ggctggtttcacatagc

SEQ ID NO: 179074 - DNA, 17 bp, Arabidopsis thaliana
ggctgtagtttagtggt

SEQ ID NO: 179075 - DNA, 17 bp, Arabidopsis thaliana
ggctgtcagcggactgc

SEQ ID NO: 179076 - DNA, 17 bp, Arabidopsis thaliana
ggctgtgggttcgaccc

SEQ ID NO: 179077 - DNA, 17 bp, Arabidopsis thaliana
ggcttcaggctctgtgt

SEQ ID NO: 179078 - DNA, 17 bp, Arabidopsis thaliana
ggcttcggccgtccggc

SEQ ID NO: 179079 - DNA, 17 bp, Arabidopsis thaliana
ggcttctaccgcaagaa

SEQ ID NO: 179080 - DNA, 17 bp, Arabidopsis thaliana
ggcttctaccgcaagag

SEQ ID NO: 179081 - DNA, 17 bp, Arabidopsis thaliana
ggcttgagtaacgcaaa

SEQ ID NO: 179082 - DNA, 17 bp, Arabidopsis thaliana
ggcttggctcaggcggt

SEQ ID NO: 179083 - DNA, 17 bp, Arabidopsis thaliana
ggctttcagattattta

SEQ ID NO: 179084 - DNA, 17 bp, Arabidopsis thaliana
ggctttctggtgggatg

SEQ ID NO: 179085 - DNA, 17 bp, Arabidopsis thaliana
ggctttgcccgcgcagg

SEQ ID NO: 179086 - DNA, 17 bp, Arabidopsis thaliana
ggctttggcgaaccggg

SEQ ID NO: 179087 - DNA, 17 bp, Arabidopsis thaliana
gggaaaaccaactgaac

SEQ ID NO: 179088 - DNA, 17 bp, Arabidopsis thaliana
gggaaactccgaataca

SEQ ID NO: 179089 - DNA, 17 bp, Arabidopsis thaliana
gggaaagggaaaggaag

SEQ ID NO: 179090 - DNA, 17 bp, Arabidopsis thaliana
gggaaatggaagatatc

SEQ ID NO: 179091 - DNA, 17 bp, Arabidopsis thaliana
gggaacctgtcagaccg

SEQ ID NO: 179092 - DNA, 17 bp, Arabidopsis thaliana
gggaacgggcttggcag

SEQ ID NO: 179093 - DNA, 17 bp, Arabidopsis thaliana
gggaacgtgagctgggt

SEQ ID NO: 179094 - DNA, 17 bp, Arabidopsis thaliana
gggaactcaaccgcttc

SEQ ID NO: 179095 - DNA, 17 bp, Arabidopsis thaliana
gggaagaatcgcgacct

SEQ ID NO: 179096 - DNA, 17 bp, Arabidopsis thaliana
gggaagaatcgcgtcct

SEQ ID NO: 179097 - DNA, 17 bp, Arabidopsis thaliana
gggaagtcctcgtgttg

SEQ ID NO: 179098 - DNA, 17 bp, Arabidopsis thaliana
gggaatgtagctcatat

SEQ ID NO: 179099 - DNA, 17 bp, Arabidopsis thaliana
gggacaagccgaccaat

SEQ ID NO: 179100 - DNA, 17 bp, Arabidopsis thaliana
gggacagtcgggggcat

SEQ ID NO: 179101 - DNA, 17 bp, Arabidopsis thaliana
gggacattacatgcttt

SEQ ID NO: 179102 - DNA, 17 bp, Arabidopsis thaliana
gggaccccgtccgctct

SEQ ID NO: 179103 - DNA, 17 bp, Arabidopsis thaliana
gggacccgaaagatgga

SEQ ID NO: 179104 - DNA, 17 bp, Arabidopsis thaliana
gggacctcaagaataca

SEQ ID NO: 179105 - DNA, 17 bp, Arabidopsis thaliana
gggacctcgtggttgta

SEQ ID NO: 179106 - DNA, 17 bp, Arabidopsis thaliana
gggacggactgggaacg

SEQ ID NO: 179107 - DNA, 17 bp, Arabidopsis thaliana
gggacggactgggatcc

SEQ ID NO: 179108 - DNA, 17 bp, Arabidopsis thaliana
gggacgtagtcaacgcg

SEQ ID NO: 179109 - DNA, 17 bp, Arabidopsis thaliana
gggactatggccgttta

SEQ ID NO: 179110 - DNA, 17 bp, Arabidopsis thaliana
gggacttgagtttcaca

SEQ ID NO: 179111 - DNA, 17 bp, Arabidopsis thaliana
gggagaccagcttccgt

SEQ ID NO: 179112 - DNA, 17 bp, Arabidopsis thaliana
gggagccggcgaccgaa

SEQ ID NO: 179113 - DNA, 17 bp, Arabidopsis thaliana
gggaggaccgggggggg

SEQ ID NO: 179114 - DNA, 17 bp, Arabidopsis thaliana
gggagggatctcgtggt

SEQ ID NO: 179115 - DNA, 17 bp, Arabidopsis thaliana
gggaggtcacccatcca

SEQ ID NO: 179116 - DNA, 17 bp, Arabidopsis thaliana
gggaggtgcggctggat

SEQ ID NO: 179117 - DNA, 17 bp, Arabidopsis thaliana
gggagtacccggacgca

SEQ ID NO: 179118 - DNA, 17 bp, Arabidopsis thaliana
gggagtatggtcgcaag

SEQ ID NO: 179119 - DNA, 17 bp, Arabidopsis thaliana
gggagtcgcagtgacca

SEQ ID NO: 179120 - DNA, 17 bp, Arabidopsis thaliana
gggagtttggctggggc

SEQ ID NO: 179121 - DNA, 17 bp, Arabidopsis thaliana
gggataacatcatagga

SEQ ID NO: 179122 - DNA, 17 bp, Arabidopsis thaliana
gggatagatcattgcaa

SEQ ID NO: 179123 - DNA, 17 bp, Arabidopsis thaliana
gggatcagcggatgttg

SEQ ID NO: 179124 - DNA, 17 bp, Arabidopsis thaliana
gggatgagccaagcaag

SEQ ID NO: 179125 - DNA, 17 bp, Arabidopsis thaliana
gggatgagccaagcccg

SEQ ID NO: 179126 - DNA, 17 bp, Arabidopsis thaliana
gggatggagaacaaact

SEQ ID NO: 179127 - DNA, 17 bp, Arabidopsis thaliana
gggatgggtcggccggt

SEQ ID NO: 179128 - DNA, 17 bp, Arabidopsis thaliana
gggatgtcaaaatgcat

SEQ ID NO: 179129 - DNA, 17 bp, Arabidopsis thaliana
gggattaaataagattt

SEQ ID NO: 179130 - DNA, 17 bp, Arabidopsis thaliana
gggattaccgcggctgc

SEQ ID NO: 179131 - DNA, 17 bp, Arabidopsis thaliana
gggattcgggggcgatt

SEQ ID NO: 179132 - DNA, 17 bp, Arabidopsis thaliana
gggattgaaggtcgcga

SEQ ID NO: 179133 - DNA, 17 bp, Arabidopsis thaliana
gggattgaaggtcggac

SEQ ID NO: 179134 - DNA, 17 bp, Arabidopsis thaliana
gggattttgttttcggg

SEQ ID NO: 179135 - DNA, 17 bp, Arabidopsis thaliana
gggcaaaggctggttca

SEQ ID NO: 179136 - DNA, 17 bp, Arabidopsis thaliana
gggcaactgcgtggtaa

SEQ ID NO: 179137 - DNA, 17 bp, Arabidopsis thaliana
gggcaagtctggtgcca

SEQ ID NO: 179138 - DNA, 17 bp, Arabidopsis thaliana
gggcaatgacgcagcta

SEQ ID NO: 179139 - DNA, 17 bp, Arabidopsis thaliana
gggcacgcctgcctggg

SEQ ID NO: 179140 - DNA, 17 bp, Arabidopsis thaliana
gggcacgtctacctggg

SEQ ID NO: 179141 - DNA, 17 bp, Arabidopsis thaliana
gggcacgtctgcctggg

SEQ ID NO: 179142 - DNA, 17 bp, Arabidopsis thaliana
gggcagagcccgcgtcg

SEQ ID NO: 179143 - DNA, 17 bp, Arabidopsis thaliana
gggcagggacgtagtca

SEQ ID NO: 179144 - DNA, 17 bp, Arabidopsis thaliana
gggcagtgatgattaaa

SEQ ID NO: 179145 - DNA, 17 bp, Arabidopsis thaliana
gggcagtgccgcgaagc

SEQ ID NO: 179146 - DNA, 17 bp, Arabidopsis thaliana
gggcagtgttggactca

SEQ ID NO: 179147 - DNA, 17 bp, Arabidopsis thaliana
gggcatatctattgtct

SEQ ID NO: 179148 - DNA, 17 bp, Arabidopsis thaliana
gggccaacaacctgcac

SEQ ID NO: 179149 - DNA, 17 bp, Arabidopsis thaliana
gggccaagggacagtct

SEQ ID NO: 179150 - DNA, 17 bp, Arabidopsis thaliana
gggccagaccggtgtcc

SEQ ID NO: 179151 - DNA, 17 bp, Arabidopsis thaliana
gggccatggcgggcagg

SEQ ID NO: 179152 - DNA, 17 bp, Arabidopsis thaliana
gggcccatagcccagtg

SEQ ID NO: 179153 - DNA, 17 bp, Arabidopsis thaliana
gggcccatagcgcagtg

SEQ ID NO: 179154 - DNA, 17 bp, Arabidopsis thaliana
gggcccatagctcagtg

SEQ ID NO: 179155 - DNA, 17 bp, Arabidopsis thaliana
gggcccgtctgcctggg

SEQ ID NO: 179156 - DNA, 17 bp, Arabidopsis thaliana
gggccgttcatctccga

SEQ ID NO: 179157 - DNA, 17 bp, Arabidopsis thaliana
gggcctgagtttcgtac

SEQ ID NO: 179158 - DNA, 17 bp, Arabidopsis thaliana
gggcctgggccgaatca

SEQ ID NO: 179159 - DNA, 17 bp, Arabidopsis thaliana
gggcctgtgtttcgtac

SEQ ID NO: 179160 - DNA, 17 bp, Arabidopsis thaliana
gggcgatttcagaagcc

SEQ ID NO: 179161 - DNA, 17 bp, Arabidopsis thaliana
gggcggaggacattgtc

SEQ ID NO: 179162 - DNA, 17 bp, Arabidopsis thaliana
gggcggcgaaccaccca

SEQ ID NO: 179163 - DNA, 17 bp, Arabidopsis thaliana
gggcggcgggcgcatgc

SEQ ID NO: 179164 - DNA, 17 bp, Arabidopsis thaliana
gggcggtgtgtacaaag

SEQ ID NO: 179165 - DNA, 17 bp, Arabidopsis thaliana
gggcgtgcttgtggact

SEQ ID NO: 179166 - DNA, 17 bp, Arabidopsis thaliana
gggcgtgggttcatatc

SEQ ID NO: 179167 - DNA, 17 bp, Arabidopsis thaliana
gggctagaagcgacgca

SEQ ID NO: 179168 - DNA, 17 bp, Arabidopsis thaliana
gggctattagctcagtg

SEQ ID NO: 179169 - DNA, 17 bp, Arabidopsis thaliana
gggctcatagcccagtg

SEQ ID NO: 179170 - DNA, 17 bp, Arabidopsis thaliana
gggctcatagctcagtg

SEQ ID NO: 179171 - DNA, 17 bp, Arabidopsis thaliana
gggctcgtctgcctggg

SEQ ID NO: 179172 - DNA, 17 bp, Arabidopsis thaliana
gggctctgaccgcgtgc

SEQ ID NO: 179173 - DNA, 17 bp, Arabidopsis thaliana
gggctgaatctcagtgg

SEQ ID NO: 179174 - DNA, 17 bp, Arabidopsis thaliana
gggcttgactctagtcc

SEQ ID NO: 179175 - DNA, 17 bp, Arabidopsis thaliana
gggcttgtagctcagag

SEQ ID NO: 179176 - DNA, 17 bp, Arabidopsis thaliana
gggcttgtcggcgggcg

SEQ ID NO: 179177 - DNA, 17 bp, Arabidopsis thaliana
gggcttgtgtacaaagg

SEQ ID NO: 179178 - DNA, 17 bp, Arabidopsis thaliana
gggcttttgatacgctt

SEQ ID NO: 179179 - DNA, 17 bp, Arabidopsis thaliana
ggggaaagatacacaga

SEQ ID NO: 179180 - DNA, 17 bp, Arabidopsis thaliana
ggggaacttttttgtta

SEQ ID NO: 179181 - DNA, 17 bp, Arabidopsis thaliana
ggggaagaatcgcgaca

SEQ ID NO: 179182 - DNA, 17 bp, Arabidopsis thaliana
ggggaagaatcgcgacc

SEQ ID NO: 179183 - DNA, 17 bp, Arabidopsis thaliana
ggggaatgttgtctggc

SEQ ID NO: 179184 - DNA, 17 bp, Arabidopsis thaliana
ggggaattgccgtgatc

SEQ ID NO: 179185 - DNA, 17 bp, Arabidopsis thaliana
ggggacattaagatggt

SEQ ID NO: 179186 - DNA, 17 bp, Arabidopsis thaliana
ggggacggactgggaac

SEQ ID NO: 179187 - DNA, 17 bp, Arabidopsis thaliana
ggggacggactgggatc

SEQ ID NO: 179188 - DNA, 17 bp, Arabidopsis thaliana
ggggagtttggctgggg

SEQ ID NO: 179189 - DNA, 17 bp, Arabidopsis thaliana
ggggatatagctcagtt

SEQ ID NO: 179190 - DNA, 17 bp, Arabidopsis thaliana
ggggatatggcggaata

SEQ ID NO: 179191 - DNA, 17 bp, Arabidopsis thaliana
ggggatatggcggaatt

SEQ ID NO: 179192 - DNA, 17 bp, Arabidopsis thaliana
ggggatgcagctcagat

SEQ ID NO: 179193 - DNA, 17 bp, Arabidopsis thaliana
ggggatgtagctcaaaa

SEQ ID NO: 179194 - DNA, 17 bp, Arabidopsis thaliana
ggggatgtagctcaaat

SEQ ID NO: 179195 - DNA, 17 bp, Arabidopsis thaliana
ggggatgtagctcaact

SEQ ID NO: 179196 - DNA, 17 bp, Arabidopsis thaliana
ggggatgtagctcaatg

SEQ ID NO: 179197 - DNA, 17 bp, Arabidopsis thaliana
ggggatgtagctcagaa

SEQ ID NO: 179198 - DNA, 17 bp, Arabidopsis thaliana
ggggatgtagctcagat

SEQ ID NO: 179199 - DNA, 17 bp, Arabidopsis thaliana
ggggcctgtgtttcgta

SEQ ID NO: 179200 - DNA, 17 bp, Arabidopsis thaliana
ggggcctttttcgaacg

SEQ ID NO: 179201 - DNA, 17 bp, Arabidopsis thaliana
ggggcgtggaccgacgc

SEQ ID NO: 179202 - DNA, 17 bp, Arabidopsis thaliana
gggggaacctagaggag

SEQ ID NO: 179203 - DNA, 17 bp, Arabidopsis thaliana
gggggccgcagtgacca

SEQ ID NO: 179204 - DNA, 17 bp, Arabidopsis thaliana
gggggcttttacaagaa

SEQ ID NO: 179205 - DNA, 17 bp, Arabidopsis thaliana
gggggtcccagttccga

SEQ ID NO: 179206 - DNA, 17 bp, Arabidopsis thaliana
gggggtcgcagtgacca

SEQ ID NO: 179207 - DNA, 17 bp, Arabidopsis thaliana
gggggtcgcagtgagtg

SEQ ID NO: 179208 - DNA, 17 bp, Arabidopsis thaliana
gggggtcgcagtggcca

SEQ ID NO: 179209 - DNA, 17 bp, Arabidopsis thaliana
gggggtcgcattgacca

SEQ ID NO: 179210 - DNA, 17 bp, Arabidopsis thaliana
gggggtcgtagtgacca

SEQ ID NO: 179211 - DNA, 17 bp, Arabidopsis thaliana
gggggtggactcggagg

SEQ ID NO: 179212 - DNA, 17 bp, Arabidopsis thaliana
gggggtgtagctcataa

SEQ ID NO: 179213 - DNA, 17 bp, Arabidopsis thaliana
gggggtgtagctcatat

SEQ ID NO: 179214 - DNA, 17 bp, Arabidopsis thaliana
ggggtagcgacgaaggc

SEQ ID NO: 179215 - DNA, 17 bp, Arabidopsis thaliana
ggggtcccagttccgaa

SEQ ID NO: 179216 - DNA, 17 bp, Arabidopsis thaliana
ggggtcttacaaggtca

SEQ ID NO: 179217 - DNA, 17 bp, Arabidopsis thaliana
ggggttcgcagtgacca

SEQ ID NO: 179218 - DNA, 17 bp, Arabidopsis thaliana
ggggttctttgatcaaa

SEQ ID NO: 179219 - DNA, 17 bp, Arabidopsis thaliana
gggtaaacaaaacaaca

SEQ ID NO: 179220 - DNA, 17 bp, Arabidopsis thaliana
gggtaaacaaaacaaga

SEQ ID NO: 179221 - DNA, 17 bp, Arabidopsis thaliana
gggtaatctttgaaatt

SEQ ID NO: 179222 - DNA, 17 bp, Arabidopsis thaliana
gggtagaatcctttgca

SEQ ID NO: 179223 - DNA, 17 bp, Arabidopsis thaliana
gggtattctgcttcttg

SEQ ID NO: 179224 - DNA, 17 bp, Arabidopsis thaliana
gggtattgtaagtggca

SEQ ID NO: 179225 - DNA, 17 bp, Arabidopsis thaliana
gggtcataacggaggca

SEQ ID NO: 179226 - DNA, 17 bp, Arabidopsis thaliana
gggtcataacggaggcc

SEQ ID NO: 179227 - DNA, 17 bp, Arabidopsis thaliana
gggtcatttgtgagatt

SEQ ID NO: 179228 - DNA, 17 bp, Arabidopsis thaliana
gggtccagcggctggaa

SEQ ID NO: 179229 - DNA, 17 bp, Arabidopsis thaliana
gggtccatagctcagtg

SEQ ID NO: 179230 - DNA, 17 bp, Arabidopsis thaliana
gggtccttagctcagtg

SEQ ID NO: 179231 - DNA, 17 bp, Arabidopsis thaliana
gggtcgatccgggcgga

SEQ ID NO: 179232 - DNA, 17 bp, Arabidopsis thaliana
gggtcgatgcccgagcg

SEQ ID NO: 179233 - DNA, 17 bp, Arabidopsis thaliana
gggtcgtgcctccagcg

SEQ ID NO: 179234 - DNA, 17 bp, Arabidopsis thaliana
gggtcttagtcgcatcc

SEQ ID NO: 179235 - DNA, 17 bp, Arabidopsis thaliana
gggtgaaaggccaacca

SEQ ID NO: 179236 - DNA, 17 bp, Arabidopsis thaliana
gggtgaaatctacagat

SEQ ID NO: 179237 - DNA, 17 bp, Arabidopsis thaliana
gggtgaacagcctctgg

SEQ ID NO: 179238 - DNA, 17 bp, Arabidopsis thaliana
gggtgacccgggctctc

SEQ ID NO: 179239 - DNA, 17 bp, Arabidopsis thaliana
gggtgacccggggttcc

SEQ ID NO: 179240 - DNA, 17 bp, Arabidopsis thaliana
gggtgacccgggttccc

SEQ ID NO: 179241 - DNA, 17 bp, Arabidopsis thaliana
gggtgacccgggttcga

SEQ ID NO: 179242 - DNA, 17 bp, Arabidopsis thaliana
gggtgacccgggttcgg

SEQ ID NO: 179243 - DNA, 17 bp, Arabidopsis thaliana
gggtgacccgggttcgt

SEQ ID NO: 179244 - DNA, 17 bp, Arabidopsis thaliana
gggtgacccgggttctc

SEQ ID NO: 179245 - DNA, 17 bp, Arabidopsis thaliana
gggtgaccggccggccg

SEQ ID NO: 179246 - DNA, 17 bp, Arabidopsis thaliana
gggtgacctgggttcgt

SEQ ID NO: 179247 - DNA, 17 bp, Arabidopsis thaliana
gggtgacggagaattag

SEQ ID NO: 179248 - DNA, 17 bp, Arabidopsis thaliana
gggtgagagccccgtcg

SEQ ID NO: 179249 - DNA, 17 bp, Arabidopsis thaliana
gggtgatgaacgaaata

SEQ ID NO: 179250 - DNA, 17 bp, Arabidopsis thaliana
gggtgatgaacgaaatg

SEQ ID NO: 179251 - DNA, 17 bp, Arabidopsis thaliana
gggtgctaagatccaaa

SEQ ID NO: 179252 - DNA, 17 bp, Arabidopsis thaliana
gggtgctatgcctaagg

SEQ ID NO: 179253 - DNA, 17 bp, Arabidopsis thaliana
gggtgcttgtggactgc

SEQ ID NO: 179254 - DNA, 17 bp, Arabidopsis thaliana
gggtggaatcctttgca

SEQ ID NO: 179255 - DNA, 17 bp, Arabidopsis thaliana
gggtggcccgggttcgg

SEQ ID NO: 179256 - DNA, 17 bp, Arabidopsis thaliana
gggtggtgagggacgaa

SEQ ID NO: 179257 - DNA, 17 bp, Arabidopsis thaliana
gggtgttggtcgattca

SEQ ID NO: 179258 - DNA, 17 bp, Arabidopsis thaliana
gggtgttgtcgattaag

SEQ ID NO: 179259 - DNA, 17 bp, Arabidopsis thaliana
gggttcgattcccgcta

SEQ ID NO: 179260 - DNA, 17 bp, Arabidopsis thaliana
gggttcgattccggaga

SEQ ID NO: 179261 - DNA, 17 bp, Arabidopsis thaliana
gggttcgggccccacgg

SEQ ID NO: 179262 - DNA, 17 bp, Arabidopsis thaliana
gggttcgggtcccactg

SEQ ID NO: 179263 - DNA, 17 bp, Arabidopsis thaliana
gggttcgtgtcccaccg

SEQ ID NO: 179264 - DNA, 17 bp, Arabidopsis thaliana
gggttcgtgtcccactg

SEQ ID NO: 179265 - DNA, 17 bp, Arabidopsis thaliana
gggttgagccaggccca

SEQ ID NO: 179266 - DNA, 17 bp, Arabidopsis thaliana
gggttgatatgagaaca

SEQ ID NO: 179267 - DNA, 17 bp, Arabidopsis thaliana
gggttggcaaggaacaa

SEQ ID NO: 179268 - DNA, 17 bp, Arabidopsis thaliana
gggttggcaaggaacag

SEQ ID NO: 179269 - DNA, 17 bp, Arabidopsis thaliana
gggttgtcaggtgtttc

SEQ ID NO: 179270 - DNA, 17 bp, Arabidopsis thaliana
gggttgttttattgttt

SEQ ID NO: 179271 - DNA, 17 bp, Arabidopsis thaliana
gggtttagaccgccgtg

SEQ ID NO: 179272 - DNA, 17 bp, Arabidopsis thaliana
gggtttatcactttgtt

SEQ ID NO: 179273 - DNA, 17 bp, Arabidopsis thaliana
gggtttgaaaacttacc

SEQ ID NO: 179274 - DNA, 17 bp, Arabidopsis thaliana
gggtttggaaattgaag

SEQ ID NO: 179275 - DNA, 17 bp, Arabidopsis thaliana
gggtttgggagggatcc

SEQ ID NO: 179276 - DNA, 17 bp, Arabidopsis thaliana
gggtttggtcttcagaa

SEQ ID NO: 179277 - DNA, 17 bp, Arabidopsis thaliana
gggttttccttatcttt

SEQ ID NO: 179278 - DNA, 17 bp, Arabidopsis thaliana
gggtttttggagggatc

SEQ ID NO: 179279 - DNA, 17 bp, Arabidopsis thaliana
ggtaaactatgcctgag

SEQ ID NO: 179280 - DNA, 17 bp, Arabidopsis thaliana
ggtaaatgggatggaga

SEQ ID NO: 179281 - DNA, 17 bp, Arabidopsis thaliana
ggtaaattccgtccaag

SEQ ID NO: 179282 - DNA, 17 bp, Arabidopsis thaliana
ggtaacacacgggagac

SEQ ID NO: 179283 - DNA, 17 bp, Arabidopsis thaliana
ggtaacgggtgacggag

SEQ ID NO: 179284 - DNA, 17 bp, Arabidopsis thaliana
ggtaactcggtctcagg

SEQ ID NO: 179285 - DNA, 17 bp, Arabidopsis thaliana
ggtaaggcaacgggtta

SEQ ID NO: 179286 - DNA, 17 bp, Arabidopsis thaliana
ggtaatgcgtgaggctg

SEQ ID NO: 179287 - DNA, 17 bp, Arabidopsis thaliana
ggtaatggcccttcaag

SEQ ID NO: 179288 - DNA, 17 bp, Arabidopsis thaliana
ggtacaaacccgggttc

SEQ ID NO: 179289 - DNA, 17 bp, Arabidopsis thaliana
ggtacaacccctgtttt

SEQ ID NO: 179290 - DNA, 17 bp, Arabidopsis thaliana
ggtacagacccaggtac

SEQ ID NO: 179291 - DNA, 17 bp, Arabidopsis thaliana
ggtacagacccaggttc

SEQ ID NO: 179292 - DNA, 17 bp, Arabidopsis thaliana
ggtacagaccccggtcc

SEQ ID NO: 179293 - DNA, 17 bp, Arabidopsis thaliana
ggtacagaccccggttc

SEQ ID NO: 179294 - DNA, 17 bp, Arabidopsis thaliana
ggtacagacccgagttc

SEQ ID NO: 179295 - DNA, 17 bp, Arabidopsis thaliana
ggtacagacccggatcc

SEQ ID NO: 179296 - DNA, 17 bp, Arabidopsis thaliana
ggtacagacccggattc

SEQ ID NO: 179297 - DNA, 17 bp, Arabidopsis thaliana
ggtacagacccggggtt

SEQ ID NO: 179298 - DNA, 17 bp, Arabidopsis thaliana
ggtacagacccgggtac

SEQ ID NO: 179299 - DNA, 17 bp, Arabidopsis thaliana
ggtacagacccgggtcc

SEQ ID NO: 179300 - DNA, 17 bp, Arabidopsis thaliana
ggtacagacccgggtcg

SEQ ID NO: 179301 - DNA, 17 bp, Arabidopsis thaliana
ggtacagacccgggttc

SEQ ID NO: 179302 - DNA, 17 bp, Arabidopsis thaliana
ggtacagacccgggttg

SEQ ID NO: 179303 - DNA, 17 bp, Arabidopsis thaliana
ggtacagacccgggttt

SEQ ID NO: 179304 - DNA, 17 bp, Arabidopsis thaliana
ggtacagacccggttcg

SEQ ID NO: 179305 - DNA, 17 bp, Arabidopsis thaliana
ggtacagaccctggttc

SEQ ID NO: 179306 - DNA, 17 bp, Arabidopsis thaliana
ggtacagaccgggttcg

SEQ ID NO: 179307 - DNA, 17 bp, Arabidopsis thaliana
ggtacagactcgggtcc

SEQ ID NO: 179308 - DNA, 17 bp, Arabidopsis thaliana
ggtacagactcgggttc

SEQ ID NO: 179309 - DNA, 17 bp, Arabidopsis thaliana
ggtacaggcccgggttc

SEQ ID NO: 179310 - DNA, 17 bp, Arabidopsis thaliana
ggtacagtcccgggttc

SEQ ID NO: 179311 - DNA, 17 bp, Arabidopsis thaliana
ggtacagtctcacacaa

SEQ ID NO: 179312 - DNA, 17 bp, Arabidopsis thaliana
ggtacagttgcgaggca

SEQ ID NO: 179313 - DNA, 17 bp, Arabidopsis thaliana
ggtacatacccgggttt

SEQ ID NO: 179314 - DNA, 17 bp, Arabidopsis thaliana
ggtacatgttgttccgt

SEQ ID NO: 179315 - DNA, 17 bp, Arabidopsis thaliana
ggtacccgagactaccc

SEQ ID NO: 179316 - DNA, 17 bp, Arabidopsis thaliana
ggtacgaaacacaggca

SEQ ID NO: 179317 - DNA, 17 bp, Arabidopsis thaliana
ggtacgaaacacaggcc

SEQ ID NO: 179318 - DNA, 17 bp, Arabidopsis thaliana
ggtacgatatttccggt

SEQ ID NO: 179319 - DNA, 17 bp, Arabidopsis thaliana
ggtacggacccgggttc

SEQ ID NO: 179320 - DNA, 17 bp, Arabidopsis thaliana
ggtacgtctgcctgggt

SEQ ID NO: 179321 - DNA, 17 bp, Arabidopsis thaliana
ggtactcattctcggcc

SEQ ID NO: 179322 - DNA, 17 bp, Arabidopsis thaliana
ggtagaagaaacttgaa

SEQ ID NO: 179323 - DNA, 17 bp, Arabidopsis thaliana
ggtagaatcctttgcag

SEQ ID NO: 179324 - DNA, 17 bp, Arabidopsis thaliana
ggtagagcgacgggcgg

SEQ ID NO: 179325 - DNA, 17 bp, Arabidopsis thaliana
ggtagatcattgcaatt

SEQ ID NO: 179326 - DNA, 17 bp, Arabidopsis thaliana
ggtagatcggttggtgt

SEQ ID NO: 179327 - DNA, 17 bp, Arabidopsis thaliana
ggtagatgcaactcttt

SEQ ID NO: 179328 - DNA, 17 bp, Arabidopsis thaliana
ggtagccaaggatgact

SEQ ID NO: 179329 - DNA, 17 bp, Arabidopsis thaliana
ggtaggacgtgtcggct

SEQ ID NO: 179330 - DNA, 17 bp, Arabidopsis thaliana
ggtaggagcaacgggcg

SEQ ID NO: 179331 - DNA, 17 bp, Arabidopsis thaliana
ggtaggagcgacgggcg

SEQ ID NO: 179332 - DNA, 17 bp, Arabidopsis thaliana
ggtaggtgcctcgatcc

SEQ ID NO: 179333 - DNA, 17 bp, Arabidopsis thaliana
ggtagtgactcagcatg

SEQ ID NO: 179334 - DNA, 17 bp, Arabidopsis thaliana
ggtagttcgaccgccaa

SEQ ID NO: 179335 - DNA, 17 bp, Arabidopsis thaliana
ggtagtttgaccgcgaa

SEQ ID NO: 179336 - DNA, 17 bp, Arabidopsis thaliana
ggtatagacccgggttc

SEQ ID NO: 179337 - DNA, 17 bp, Arabidopsis thaliana
ggtatcgacaatgatcc

SEQ ID NO: 179338 - DNA, 17 bp, Arabidopsis thaliana
ggtatcttgatgatgct

SEQ ID NO: 179339 - DNA, 17 bp, Arabidopsis thaliana
ggtattgtaagtggcag

SEQ ID NO: 179340 - DNA, 17 bp, Arabidopsis thaliana
ggtcaaacatctactag

SEQ ID NO: 179341 - DNA, 17 bp, Arabidopsis thaliana
ggtcaactataccgaat

SEQ ID NO: 179342 - DNA, 17 bp, Arabidopsis thaliana
ggtcaagaaaaggcctt

SEQ ID NO: 179343 - DNA, 17 bp, Arabidopsis thaliana
ggtcaagcaactgatag

SEQ ID NO: 179344 - DNA, 17 bp, Arabidopsis thaliana
ggtcaagtgatgatgct

SEQ ID NO: 179345 - DNA, 17 bp, Arabidopsis thaliana
ggtcagatggccgagcg

SEQ ID NO: 179346 - DNA, 17 bp, Arabidopsis thaliana
ggtcaggacattggact

SEQ ID NO: 179347 - DNA, 17 bp, Arabidopsis thaliana
ggtcagtatgagaggga

SEQ ID NO: 179348 - DNA, 17 bp, Arabidopsis thaliana
ggtcataacggaggcct

SEQ ID NO: 179349 - DNA, 17 bp, Arabidopsis thaliana
ggtcatgctctgacagc

SEQ ID NO: 179350 - DNA, 17 bp, Arabidopsis thaliana
ggtccactgagattcag

SEQ ID NO: 179351 - DNA, 17 bp, Arabidopsis thaliana
ggtcccatccaaggaag

SEQ ID NO: 179352 - DNA, 17 bp, Arabidopsis thaliana
ggtcccgagttcggttc

SEQ ID NO: 179353 - DNA, 17 bp, Arabidopsis thaliana
ggtcccgtagcccagtt

SEQ ID NO: 179354 - DNA, 17 bp, Arabidopsis thaliana
ggtcccgtagctcagta

SEQ ID NO: 179355 - DNA, 17 bp, Arabidopsis thaliana
ggtcccgtagctcagtt

SEQ ID NO: 179356 - DNA, 17 bp, Arabidopsis thaliana
ggtccgaacgacgcttc

SEQ ID NO: 179357 - DNA, 17 bp, Arabidopsis thaliana
ggtccgacccgaggaat

SEQ ID NO: 179358 - DNA, 17 bp, Arabidopsis thaliana
ggtccggtgcgccctcg

SEQ ID NO: 179359 - DNA, 17 bp, Arabidopsis thaliana
ggtccgtcgctgaggaa

SEQ ID NO: 179360 - DNA, 17 bp, Arabidopsis thaliana
ggtccttggatctgcga

SEQ ID NO: 179361 - DNA, 17 bp, Arabidopsis thaliana
ggtcgatgaagtctcgg

SEQ ID NO: 179362 - DNA, 17 bp, Arabidopsis thaliana
ggtcgcaaggctgaaac

SEQ ID NO: 179363 - DNA, 17 bp, Arabidopsis thaliana
ggtcgcagtgaccaggc

SEQ ID NO: 179364 - DNA, 17 bp, Arabidopsis thaliana
ggtcgccgcgtgctggc

SEQ ID NO: 179365 - DNA, 17 bp, Arabidopsis thaliana
ggtcgcgattcttcccc

SEQ ID NO: 179366 - DNA, 17 bp, Arabidopsis thaliana
ggtcgctgcaaaaccta

SEQ ID NO: 179367 - DNA, 17 bp, Arabidopsis thaliana
ggtcggcaatcggacgg

SEQ ID NO: 179368 - DNA, 17 bp, Arabidopsis thaliana
ggtcggcaatcgggcgg

SEQ ID NO: 179369 - DNA, 17 bp, Arabidopsis thaliana
ggtcggccggtccgcct

SEQ ID NO: 179370 - DNA, 17 bp, Arabidopsis thaliana
ggtcggcgatacgctcc

SEQ ID NO: 179371 - DNA, 17 bp, Arabidopsis thaliana
ggtcggcgatacgctct

SEQ ID NO: 179372 - DNA, 17 bp, Arabidopsis thaliana
ggtcggcgtcgaaggcg

SEQ ID NO: 179373 - DNA, 17 bp, Arabidopsis thaliana
ggtcggctcgtcccttc

SEQ ID NO: 179374 - DNA, 17 bp, Arabidopsis thaliana
ggtcggcttgtcccttc

SEQ ID NO: 179375 - DNA, 17 bp, Arabidopsis thaliana
ggtcggcttgtcctttc

SEQ ID NO: 179376 - DNA, 17 bp, Arabidopsis thaliana
ggtcgtactcataaccg

SEQ ID NO: 179377 - DNA, 17 bp, Arabidopsis thaliana
ggtcgtagtcgcatcct

SEQ ID NO: 179378 - DNA, 17 bp, Arabidopsis thaliana
ggtcgtggtcggggact

SEQ ID NO: 179379 - DNA, 17 bp, Arabidopsis thaliana
ggtctacgaatcctaag

SEQ ID NO: 179380 - DNA, 17 bp, Arabidopsis thaliana
ggtctagattgcagccg

SEQ ID NO: 179381 - DNA, 17 bp, Arabidopsis thaliana
ggtctaggaggcggtag

SEQ ID NO: 179382 - DNA, 17 bp, Arabidopsis thaliana
ggtctatttgtcaccag

SEQ ID NO: 179383 - DNA, 17 bp, Arabidopsis thaliana
ggtctgtgatgccctta

SEQ ID NO: 179384 - DNA, 17 bp, Arabidopsis thaliana
ggtcttaagttgcttgt

SEQ ID NO: 179385 - DNA, 17 bp, Arabidopsis thaliana
ggtcttagtccatcctg

SEQ ID NO: 179386 - DNA, 17 bp, Arabidopsis thaliana
ggtcttagtcgcatcca

SEQ ID NO: 179387 - DNA, 17 bp, Arabidopsis thaliana
ggtcttagtcgcatcct

SEQ ID NO: 179388 - DNA, 17 bp, Arabidopsis thaliana
ggtcttccttgccgggg

SEQ ID NO: 179389 - DNA, 17 bp, Arabidopsis thaliana
ggtcttggatcgggtat

SEQ ID NO: 179390 - DNA, 17 bp, Arabidopsis thaliana
ggtcttgtcgtgcgcgt

SEQ ID NO: 179391 - DNA, 17 bp, Arabidopsis thaliana
ggtctttaatcccatat

SEQ ID NO: 179392 - DNA, 17 bp, Arabidopsis thaliana
ggtgaacctgcagaagg

SEQ ID NO: 179393 - DNA, 17 bp, Arabidopsis thaliana
ggtgaacctgcggaagg

SEQ ID NO: 179394 - DNA, 17 bp, Arabidopsis thaliana
ggtgaacctgtggaagg

SEQ ID NO: 179395 - DNA, 17 bp, Arabidopsis thaliana
ggtgaactatgcctgag

SEQ ID NO: 179396 - DNA, 17 bp, Arabidopsis thaliana
ggtgaaggacgacgatt

SEQ ID NO: 179397 - DNA, 17 bp, Arabidopsis thaliana
ggtgaagtcgaaacaag

SEQ ID NO: 179398 - DNA, 17 bp, Arabidopsis thaliana
ggtgaagtgttcagatc

SEQ ID NO: 179399 - DNA, 17 bp, Arabidopsis thaliana
ggtgaagtgttcggatc

SEQ ID NO: 179400 - DNA, 17 bp, Arabidopsis thaliana
ggtgaagtgttctgatc

SEQ ID NO: 179401 - DNA, 17 bp, Arabidopsis thaliana
ggtgaatcctagagttg

SEQ ID NO: 179402 - DNA, 17 bp, Arabidopsis thaliana
ggtgaatctgagtggcg

SEQ ID NO: 179403 - DNA, 17 bp, Arabidopsis thaliana
ggtgacccgagttcgtt

SEQ ID NO: 179404 - DNA, 17 bp, Arabidopsis thaliana
ggtgacccgggttctcc

SEQ ID NO: 179405 - DNA, 17 bp, Arabidopsis thaliana
ggtgacggagaattagg

SEQ ID NO: 179406 - DNA, 17 bp, Arabidopsis thaliana
ggtgagaaatctgctta

SEQ ID NO: 179407 - DNA, 17 bp, Arabidopsis thaliana
ggtgagaaccggtcgcg

SEQ ID NO: 179408 - DNA, 17 bp, Arabidopsis thaliana
ggtgagatttagattta

SEQ ID NO: 179409 - DNA, 17 bp, Arabidopsis thaliana
ggtgagggacgacaatt

SEQ ID NO: 179410 - DNA, 17 bp, Arabidopsis thaliana
ggtgagggacgacgata

SEQ ID NO: 179411 - DNA, 17 bp, Arabidopsis thaliana
ggtgagggacgacgatt

SEQ ID NO: 179412 - DNA, 17 bp, Arabidopsis thaliana
ggtgagtaaacccgtaa

SEQ ID NO: 179413 - DNA, 17 bp, Arabidopsis thaliana
ggtgagtcttacgctcg

SEQ ID NO: 179414 - DNA, 17 bp, Arabidopsis thaliana
ggtgagtcttacgctgg

SEQ ID NO: 179415 - DNA, 17 bp, Arabidopsis thaliana
ggtgatcctgcggaagg

SEQ ID NO: 179416 - DNA, 17 bp, Arabidopsis thaliana
ggtgatttgacggcaaa

SEQ ID NO: 179417 - DNA, 17 bp, Arabidopsis thaliana
ggtgatttttctatctt

SEQ ID NO: 179418 - DNA, 17 bp, Arabidopsis thaliana
ggtgcaacagaccgttg

SEQ ID NO: 179419 - DNA, 17 bp, Arabidopsis thaliana
ggtgcaccgccaccgac

SEQ ID NO: 179420 - DNA, 17 bp, Arabidopsis thaliana
ggtgcagacccgggttc

SEQ ID NO: 179421 - DNA, 17 bp, Arabidopsis thaliana
ggtgcaggaatctgagc

SEQ ID NO: 179422 - DNA, 17 bp, Arabidopsis thaliana
ggtgccactcctatttc

SEQ ID NO: 179423 - DNA, 17 bp, Arabidopsis thaliana
ggtgccagcagccgcgg

SEQ ID NO: 179424 - DNA, 17 bp, Arabidopsis thaliana
ggtgcccaactgcgcgc

SEQ ID NO: 179425 - DNA, 17 bp, Arabidopsis thaliana
ggtgccgaaggcagggc

SEQ ID NO: 179426 - DNA, 17 bp, Arabidopsis thaliana
ggtgctaagatccaaag

SEQ ID NO: 179427 - DNA, 17 bp, Arabidopsis thaliana
ggtgctggtgtagtggt

SEQ ID NO: 179428 - DNA, 17 bp, Arabidopsis thaliana
ggtgctgtcgtgtagtg

SEQ ID NO: 179429 - DNA, 17 bp, Arabidopsis thaliana
ggtgctttgaatggtaa

SEQ ID NO: 179430 - DNA, 17 bp, Arabidopsis thaliana
ggtggaacactggctcg

SEQ ID NO: 179431 - DNA, 17 bp, Arabidopsis thaliana
ggtggaagcccgcagcg

SEQ ID NO: 179432 - DNA, 17 bp, Arabidopsis thaliana
ggtggagcgatttgtct

SEQ ID NO: 179433 - DNA, 17 bp, Arabidopsis thaliana
ggtggattgtggcctaa

SEQ ID NO: 179434 - DNA, 17 bp, Arabidopsis thaliana
ggtggcattgggatttc

SEQ ID NO: 179435 - DNA, 17 bp, Arabidopsis thaliana
ggtggctgtagtttagt

SEQ ID NO: 179436 - DNA, 17 bp, Arabidopsis thaliana
ggtgggacactggttcg

SEQ ID NO: 179437 - DNA, 17 bp, Arabidopsis thaliana
ggtggggagtttggctg

SEQ ID NO: 179438 - DNA, 17 bp, Arabidopsis thaliana
ggtggtaggtagttcga

SEQ ID NO: 179439 - DNA, 17 bp, Arabidopsis thaliana
ggtggtggtgcatggcc

SEQ ID NO: 179440 - DNA, 17 bp, Arabidopsis thaliana
ggtggttgctactgaag

SEQ ID NO: 179441 - DNA, 17 bp, Arabidopsis thaliana
ggtgtagcgaagaagca

SEQ ID NO: 179442 - DNA, 17 bp, Arabidopsis thaliana
ggtgtaggataagtggg

SEQ ID NO: 179443 - DNA, 17 bp, Arabidopsis thaliana
ggtgtcattggtcggct

SEQ ID NO: 179444 - DNA, 17 bp, Arabidopsis thaliana
ggtgtcttcaacttggg

SEQ ID NO: 179445 - DNA, 17 bp, Arabidopsis thaliana
ggtgtgacccgacgaac

SEQ ID NO: 179446 - DNA, 17 bp, Arabidopsis thaliana
ggtgtgcattggtcggc

SEQ ID NO: 179447 - DNA, 17 bp, Arabidopsis thaliana
ggtgtgcattggtcggt

SEQ ID NO: 179448 - DNA, 17 bp, Arabidopsis thaliana
ggtgtgtacaaagggca

SEQ ID NO: 179449 - DNA, 17 bp, Arabidopsis thaliana
ggttaaggaagttggta

SEQ ID NO: 179450 - DNA, 17 bp, Arabidopsis thaliana
ggttagaccgtcgtgag

SEQ ID NO: 179451 - DNA, 17 bp, Arabidopsis thaliana
ggttatccacttcttag

SEQ ID NO: 179452 - DNA, 17 bp, Arabidopsis thaliana
ggttatccggcggacca

SEQ ID NO: 179453 - DNA, 17 bp, Arabidopsis thaliana
ggttatcgaagagaatg

SEQ ID NO: 179454 - DNA, 17 bp, Arabidopsis thaliana
ggttcaaaccccacttc

SEQ ID NO: 179455 - DNA, 17 bp, Arabidopsis thaliana
ggttcaaatccaggatg

SEQ ID NO: 179456 - DNA, 17 bp, Arabidopsis thaliana
ggttcaaatcccacacc

SEQ ID NO: 179457 - DNA, 17 bp, Arabidopsis thaliana
ggttcaaatcccacagc

SEQ ID NO: 179458 - DNA, 17 bp, Arabidopsis thaliana
ggttcaaatcccacagt

SEQ ID NO: 179459 - DNA, 17 bp, Arabidopsis thaliana
ggttcaagaacggatcc

SEQ ID NO: 179460 - DNA, 17 bp, Arabidopsis thaliana
ggttcaagtccctcctt

SEQ ID NO: 179461 - DNA, 17 bp, Arabidopsis thaliana
ggttcagatcccacaga

SEQ ID NO: 179462 - DNA, 17 bp, Arabidopsis thaliana
ggttcagatcccacagt

SEQ ID NO: 179463 - DNA, 17 bp, Arabidopsis thaliana
ggttcatatcccacaga

SEQ ID NO: 179464 - DNA, 17 bp, Arabidopsis thaliana
ggttcatatcccacagc

SEQ ID NO: 179465 - DNA, 17 bp, Arabidopsis thaliana
ggttcatatcccacagt

SEQ ID NO: 179466 - DNA, 17 bp, Arabidopsis thaliana
ggttcatcaaccagggt

SEQ ID NO: 179467 - DNA, 17 bp, Arabidopsis thaliana
ggttcatcccacagcta

SEQ ID NO: 179468 - DNA, 17 bp, Arabidopsis thaliana
ggttcatcccacagctg

SEQ ID NO: 179469 - DNA, 17 bp, Arabidopsis thaliana
ggttcatcccacagtta

SEQ ID NO: 179470 - DNA, 17 bp, Arabidopsis thaliana
ggttcatcccacagttg

SEQ ID NO: 179471 - DNA, 17 bp, Arabidopsis thaliana
ggttccccgcatctcca

SEQ ID NO: 179472 - DNA, 17 bp, Arabidopsis thaliana
ggttccgactccggtta

SEQ ID NO: 179473 - DNA, 17 bp, Arabidopsis thaliana
ggttccggttgctgaag

SEQ ID NO: 179474 - DNA, 17 bp, Arabidopsis thaliana
ggttcctctcgtactag

SEQ ID NO: 179475 - DNA, 17 bp, Arabidopsis thaliana
ggttcctgccgaagttt

SEQ ID NO: 179476 - DNA, 17 bp, Arabidopsis thaliana
ggttcctgcggaaggat

SEQ ID NO: 179477 - DNA, 17 bp, Arabidopsis thaliana
ggttcgaacccggccaa

SEQ ID NO: 179478 - DNA, 17 bp, Arabidopsis thaliana
ggttcgaacccgggctc

SEQ ID NO: 179479 - DNA, 17 bp, Arabidopsis thaliana
ggttcgaatcccatttc

SEQ ID NO: 179480 - DNA, 17 bp, Arabidopsis thaliana
ggttcgactccgtcctt

SEQ ID NO: 179481 - DNA, 17 bp, Arabidopsis thaliana
ggttcgagccccgtcag

SEQ ID NO: 179482 - DNA, 17 bp, Arabidopsis thaliana
ggttcgagtcccaccgg

SEQ ID NO: 179483 - DNA, 17 bp, Arabidopsis thaliana
ggttcgattcccgctat

SEQ ID NO: 179484 - DNA, 17 bp, Arabidopsis thaliana
ggttcgattcccgtaag

SEQ ID NO: 179485 - DNA, 17 bp, Arabidopsis thaliana
ggttcgattccgactga

SEQ ID NO: 179486 - DNA, 17 bp, Arabidopsis thaliana
ggttcgattccggttgc

SEQ ID NO: 179487 - DNA, 17 bp, Arabidopsis thaliana
ggttcgctcgccgttac

SEQ ID NO: 179488 - DNA, 17 bp, Arabidopsis thaliana
ggttcggaacctgcatg

SEQ ID NO: 179489 - DNA, 17 bp, Arabidopsis thaliana
ggttcggctcccggccg

SEQ ID NO: 179490 - DNA, 17 bp, Arabidopsis thaliana
ggttcgggtcccaccgg

SEQ ID NO: 179491 - DNA, 17 bp, Arabidopsis thaliana
ggttcgggtcccactgg

SEQ ID NO: 179492 - DNA, 17 bp, Arabidopsis thaliana
ggttcgggtcccggcga

SEQ ID NO: 179493 - DNA, 17 bp, Arabidopsis thaliana
ggttcggtccctgtata

SEQ ID NO: 179494 - DNA, 17 bp, Arabidopsis thaliana
ggttcggttgttcgccg

SEQ ID NO: 179495 - DNA, 17 bp, Arabidopsis thaliana
ggttcgtacccgggcga

SEQ ID NO: 179496 - DNA, 17 bp, Arabidopsis thaliana
ggttcgtatcccactgg

SEQ ID NO: 179497 - DNA, 17 bp, Arabidopsis thaliana
ggttcgtcccggcgacg

SEQ ID NO: 179498 - DNA, 17 bp, Arabidopsis thaliana
ggttcgtgtcccactgg

SEQ ID NO: 179499 - DNA, 17 bp, Arabidopsis thaliana
ggttcgttagtgttttg

SEQ ID NO: 179500 - DNA, 17 bp, Arabidopsis thaliana
ggttcgttccccacaga

SEQ ID NO: 179501 - DNA, 17 bp, Arabidopsis thaliana
ggttcgttccccggcaa

SEQ ID NO: 179502 - DNA, 17 bp, Arabidopsis thaliana
ggttcgtttcccggctg

SEQ ID NO: 179503 - DNA, 17 bp, Arabidopsis thaliana
ggttcgtttccctggat

SEQ ID NO: 179504 - DNA, 17 bp, Arabidopsis thaliana
ggttctatagtgtagtg

SEQ ID NO: 179505 - DNA, 17 bp, Arabidopsis thaliana
ggttctatcgtctatcg

SEQ ID NO: 179506 - DNA, 17 bp, Arabidopsis thaliana
ggttctatggtctatcg

SEQ ID NO: 179507 - DNA, 17 bp, Arabidopsis thaliana
ggttctatggtgtagtg

SEQ ID NO: 179508 - DNA, 17 bp, Arabidopsis thaliana
ggttctatggtgtattg

SEQ ID NO: 179509 - DNA, 17 bp, Arabidopsis thaliana
ggttctgagcgacgccc

SEQ ID NO: 179510 - DNA, 17 bp, Arabidopsis thaliana
ggttctgagcgacgcta

SEQ ID NO: 179511 - DNA, 17 bp, Arabidopsis thaliana
ggttctgagcgacgctc

SEQ ID NO: 179512 - DNA, 17 bp, Arabidopsis thaliana
ggttctgcctattaact

SEQ ID NO: 179513 - DNA, 17 bp, Arabidopsis thaliana
ggttctggtctagcggt

SEQ ID NO: 179514 - DNA, 17 bp, Arabidopsis thaliana
ggttctggtgtagtgga

SEQ ID NO: 179515 - DNA, 17 bp, Arabidopsis thaliana
ggttctggtgtagtggt

SEQ ID NO: 179516 - DNA, 17 bp, Arabidopsis thaliana
ggttcttgagattgtca

SEQ ID NO: 179517 - DNA, 17 bp, Arabidopsis thaliana
ggttcttgtgtagtgga

SEQ ID NO: 179518 - DNA, 17 bp, Arabidopsis thaliana
ggttgatccctggtgag

SEQ ID NO: 179519 - DNA, 17 bp, Arabidopsis thaliana
ggttgcagtagcagtaa

SEQ ID NO: 179520 - DNA, 17 bp, Arabidopsis thaliana
ggttggcaacacagtca

SEQ ID NO: 179521 - DNA, 17 bp, Arabidopsis thaliana
ggttggcctaaatccgt

SEQ ID NO: 179522 - DNA, 17 bp, Arabidopsis thaliana
ggttgggtttgattcta

SEQ ID NO: 179523 - DNA, 17 bp, Arabidopsis thaliana
ggttggtccgcctttgg

SEQ ID NO: 179524 - DNA, 17 bp, Arabidopsis thaliana
ggttgtatgggtttaga

SEQ ID NO: 179525 - DNA, 17 bp, Arabidopsis thaliana
ggttgtccgacagggca

SEQ ID NO: 179526 - DNA, 17 bp, Arabidopsis thaliana
ggttgtccggcgatggt

SEQ ID NO: 179527 - DNA, 17 bp, Arabidopsis thaliana
ggtttagaaattttgtt

SEQ ID NO: 179528 - DNA, 17 bp, Arabidopsis thaliana
ggtttatcactttgttt

SEQ ID NO: 179529 - DNA, 17 bp, Arabidopsis thaliana
ggtttcacagagcagcg

SEQ ID NO: 179530 - DNA, 17 bp, Arabidopsis thaliana
ggtttcacttgcacgga

SEQ ID NO: 179531 - DNA, 17 bp, Arabidopsis thaliana
ggtttccaagggtcttg

SEQ ID NO: 179532 - DNA, 17 bp, Arabidopsis thaliana
ggtttccctggatgcgc

SEQ ID NO: 179533 - DNA, 17 bp, Arabidopsis thaliana
ggtttccgtaggtgaac

SEQ ID NO: 179534 - DNA, 17 bp, Arabidopsis thaliana
ggtttcgaagatctcgc

SEQ ID NO: 179535 - DNA, 17 bp, Arabidopsis thaliana
ggtttcgtcgtgtagta

SEQ ID NO: 179536 - DNA, 17 bp, Arabidopsis thaliana
ggtttcgtcgtgtagtt

SEQ ID NO: 179537 - DNA, 17 bp, Arabidopsis thaliana
ggtttcgtggtgtagtt

SEQ ID NO: 179538 - DNA, 17 bp, Arabidopsis thaliana
ggtttcttcgtgaatat

SEQ ID NO: 179539 - DNA, 17 bp, Arabidopsis thaliana
ggtttggaagcgactca

SEQ ID NO: 179540 - DNA, 17 bp, Arabidopsis thaliana
ggtttggaagcgactcg

SEQ ID NO: 179541 - DNA, 17 bp, Arabidopsis thaliana
ggtttggacgcagagat

SEQ ID NO: 179542 - DNA, 17 bp, Arabidopsis thaliana
ggtttggtcttcagaaa

SEQ ID NO: 179543 - DNA, 17 bp, Arabidopsis thaliana
ggtttgtactacggtga

SEQ ID NO: 179544 - DNA, 17 bp, Arabidopsis thaliana
ggttttctgtttcatct

SEQ ID NO: 179545 - DNA, 17 bp, Arabidopsis thaliana
ggttttgatggcttgtt

SEQ ID NO: 179546 - DNA, 17 bp, Arabidopsis thaliana
ggttttgggatcatact

SEQ ID NO: 179547 - DNA, 17 bp, Arabidopsis thaliana
ggtttttcttaggggga

SEQ ID NO: 179548 - DNA, 17 bp, Arabidopsis thaliana
gtaaaaaaagttgtaac

SEQ ID NO: 179549 - DNA, 17 bp, Arabidopsis thaliana
gtaaaattcatccgctt

SEQ ID NO: 179550 - DNA, 17 bp, Arabidopsis thaliana
gtaaacaaaaattgtgt

SEQ ID NO: 179551 - DNA, 17 bp, Arabidopsis thaliana
gtaaacaaagtgataaa

SEQ ID NO: 179552 - DNA, 17 bp, Arabidopsis thaliana
gtaaacaataaaacaaa

SEQ ID NO: 179553 - DNA, 17 bp, Arabidopsis thaliana
gtaaacggcgggagtaa

SEQ ID NO: 179554 - DNA, 17 bp, Arabidopsis thaliana
gtaaagaatttccaccg

SEQ ID NO: 179555 - DNA, 17 bp, Arabidopsis thaliana
gtaaagccagagcccga

SEQ ID NO: 179556 - DNA, 17 bp, Arabidopsis thaliana
gtaaagctgctaagcta

SEQ ID NO: 179557 - DNA, 17 bp, Arabidopsis thaliana
gtaaatctatacatgtc

SEQ ID NO: 179558 - DNA, 17 bp, Arabidopsis thaliana
gtaaatgggatggagaa

SEQ ID NO: 179559 - DNA, 17 bp, Arabidopsis thaliana
gtaacacggaccaagga

SEQ ID NO: 179560 - DNA, 17 bp, Arabidopsis thaliana
gtaacacttatttctgc

SEQ ID NO: 179561 - DNA, 17 bp, Arabidopsis thaliana
gtaacacttatttcttc

SEQ ID NO: 179562 - DNA, 17 bp, Arabidopsis thaliana
gtaacagcgccggaggc

SEQ ID NO: 179563 - DNA, 17 bp, Arabidopsis thaliana
gtaacctgcatgggcca

SEQ ID NO: 179564 - DNA, 17 bp, Arabidopsis thaliana
gtaacctggctctgata

SEQ ID NO: 179565 - DNA, 17 bp, Arabidopsis thaliana
gtaacgggtgacggaga

SEQ ID NO: 179566 - DNA, 17 bp, Arabidopsis thaliana
gtaactcggtctcaggc

SEQ ID NO: 179567 - DNA, 17 bp, Arabidopsis thaliana
gtaactgtattagcaac

SEQ ID NO: 179568 - DNA, 17 bp, Arabidopsis thaliana
gtaagacgtgtgtgtca

SEQ ID NO: 179569 - DNA, 17 bp, Arabidopsis thaliana
gtaagcgcgagtcatca

SEQ ID NO: 179570 - DNA, 17 bp, Arabidopsis thaliana
gtaaggccctgttcgtt

SEQ ID NO: 179571 - DNA, 17 bp, Arabidopsis thaliana
gtaagtatgaacgaatt

SEQ ID NO: 179572 - DNA, 17 bp, Arabidopsis thaliana
gtaagtggcagagtggc

SEQ ID NO: 179573 - DNA, 17 bp, Arabidopsis thaliana
gtaagtggcggagtggc

SEQ ID NO: 179574 - DNA, 17 bp, Arabidopsis thaliana
gtaatactaaacatatt

SEQ ID NO: 179575 - DNA, 17 bp, Arabidopsis thaliana
gtaatcccgggaggtga

SEQ ID NO: 179576 - DNA, 17 bp, Arabidopsis thaliana
gtaatctaatagaaaca

SEQ ID NO: 179577 - DNA, 17 bp, Arabidopsis thaliana
gtaatctaatagaaact

SEQ ID NO: 179578 - DNA, 17 bp, Arabidopsis thaliana
gtaatcttgaggtccct

SEQ ID NO: 179579 - DNA, 17 bp, Arabidopsis thaliana
gtaatgacatcgctaca

SEQ ID NO: 179580 - DNA, 17 bp, Arabidopsis thaliana
gtaatgatttgtctcaa

SEQ ID NO: 179581 - DNA, 17 bp, Arabidopsis thaliana
gtaatgccgtcgaaaag

SEQ ID NO: 179582 - DNA, 17 bp, Arabidopsis thaliana
gtaatgccgtcgaaaat

SEQ ID NO: 179583 - DNA, 17 bp, Arabidopsis thaliana
gtaattagtgagattta

SEQ ID NO: 179584 - DNA, 17 bp, Arabidopsis thaliana
gtaattagtgagatttg

SEQ ID NO: 179585 - DNA, 17 bp, Arabidopsis thaliana
gtacaaagggcagggac

SEQ ID NO: 179586 - DNA, 17 bp, Arabidopsis thaliana
gtacaacccctgttttt

SEQ ID NO: 179587 - DNA, 17 bp, Arabidopsis thaliana
gtacacaccgcccgtcg

SEQ ID NO: 179588 - DNA, 17 bp, Arabidopsis thaliana
gtacagacccgggttca

SEQ ID NO: 179589 - DNA, 17 bp, Arabidopsis thaliana
gtacagacccgggttcg

SEQ ID NO: 179590 - DNA, 17 bp, Arabidopsis thaliana
gtacataccggaagggt

SEQ ID NO: 179591 - DNA, 17 bp, Arabidopsis thaliana
gtaccaatttctaggaa

SEQ ID NO: 179592 - DNA, 17 bp, Arabidopsis thaliana
gtacgcgaatccagaga

SEQ ID NO: 179593 - DNA, 17 bp, Arabidopsis thaliana
gtacggacaaggggaat

SEQ ID NO: 179594 - DNA, 17 bp, Arabidopsis thaliana
gtacggctttggctcgg

SEQ ID NO: 179595 - DNA, 17 bp, Arabidopsis thaliana
gtacgtctgcctgggtg

SEQ ID NO: 179596 - DNA, 17 bp, Arabidopsis thaliana
gtactaagtaacacaat

SEQ ID NO: 179597 - DNA, 17 bp, Arabidopsis thaliana
gtactaggatgggtgac

SEQ ID NO: 179598 - DNA, 17 bp, Arabidopsis thaliana
gtactcataaccgcagc

SEQ ID NO: 179599 - DNA, 17 bp, Arabidopsis thaliana
gtactcttcttgctcac

SEQ ID NO: 179600 - DNA, 17 bp, Arabidopsis thaliana
gtactgatgatgctgac

SEQ ID NO: 179601 - DNA, 17 bp, Arabidopsis thaliana
gtactgttgtctggctc

SEQ ID NO: 179602 - DNA, 17 bp, Arabidopsis thaliana
gtacttagccaacgaca

SEQ ID NO: 179603 - DNA, 17 bp, Arabidopsis thaliana
gtactttatgcgaaact

SEQ ID NO: 179604 - DNA, 17 bp, Arabidopsis thaliana
gtactttttcatgaatt

SEQ ID NO: 179605 - DNA, 17 bp, Arabidopsis thaliana
gtagaaactcgacagac

SEQ ID NO: 179606 - DNA, 17 bp, Arabidopsis thaliana
gtagaatagtaccctgc

SEQ ID NO: 179607 - DNA, 17 bp, Arabidopsis thaliana
gtagaatcctttgcaga

SEQ ID NO: 179608 - DNA, 17 bp, Arabidopsis thaliana
gtagacacgacaagaca

SEQ ID NO: 179609 - DNA, 17 bp, Arabidopsis thaliana
gtagacagggacagtgg

SEQ ID NO: 179610 - DNA, 17 bp, Arabidopsis thaliana
gtagacatggtccaagc

SEQ ID NO: 179611 - DNA, 17 bp, Arabidopsis thaliana
gtagacgttgacaatta

SEQ ID NO: 179612 - DNA, 17 bp, Arabidopsis thaliana
gtagacgttgacaattc

SEQ ID NO: 179613 - DNA, 17 bp, Arabidopsis thaliana
gtagatgatcctttgtc

SEQ ID NO: 179614 - DNA, 17 bp, Arabidopsis thaliana
gtagatgatgcttcttc

SEQ ID NO: 179615 - DNA, 17 bp, Arabidopsis thaliana
gtagatttcgagatcca

SEQ ID NO: 179616 - DNA, 17 bp, Arabidopsis thaliana
gtagcaacttgtggccc

SEQ ID NO: 179617 - DNA, 17 bp, Arabidopsis thaliana
gtagcagtgacctaatt

SEQ ID NO: 179618 - DNA, 17 bp, Arabidopsis thaliana
gtagcattctaccgatg

SEQ ID NO: 179619 - DNA, 17 bp, Arabidopsis thaliana
gtagccaaggatgactt

SEQ ID NO: 179620 - DNA, 17 bp, Arabidopsis thaliana
gtagccgagaagattat

SEQ ID NO: 179621 - DNA, 17 bp, Arabidopsis thaliana
gtagcgcagcggaagcg

SEQ ID NO: 179622 - DNA, 17 bp, Arabidopsis thaliana
gtagctatttggttcgc

SEQ ID NO: 179623 - DNA, 17 bp, Arabidopsis thaliana
gtagctggtccgagagg

SEQ ID NO: 179624 - DNA, 17 bp, Arabidopsis thaliana
gtaggaaaatcgtttat

SEQ ID NO: 179625 - DNA, 17 bp, Arabidopsis thaliana
gtaggacgtgtcggctg

SEQ ID NO: 179626 - DNA, 17 bp, Arabidopsis thaliana
gtaggagcgacgggcgg

SEQ ID NO: 179627 - DNA, 17 bp, Arabidopsis thaliana
gtaggcccaggatagtt

SEQ ID NO: 179628 - DNA, 17 bp, Arabidopsis thaliana
gtagggagggacttatg

SEQ ID NO: 179629 - DNA, 17 bp, Arabidopsis thaliana
gtaggggtggaccaacc

SEQ ID NO: 179630 - DNA, 17 bp, Arabidopsis thaliana
gtagggtccagcggctg

SEQ ID NO: 179631 - DNA, 17 bp, Arabidopsis thaliana
gtaggtgacaacattag

SEQ ID NO: 179632 - DNA, 17 bp, Arabidopsis thaliana
gtagtaatggcgaaact

SEQ ID NO: 179633 - DNA, 17 bp, Arabidopsis thaliana
gtagtctcttttacaag

SEQ ID NO: 179634 - DNA, 17 bp, Arabidopsis thaliana
gtagtttctctccgagg

SEQ ID NO: 179635 - DNA, 17 bp, Arabidopsis thaliana
gtagttttacgttgggc

SEQ ID NO: 179636 - DNA, 17 bp, Arabidopsis thaliana
gtatcaaaagcccgggc

SEQ ID NO: 179637 - DNA, 17 bp, Arabidopsis thaliana
gtatcaaagaccaagct

SEQ ID NO: 179638 - DNA, 17 bp, Arabidopsis thaliana
gtatcatcattcgcttg

SEQ ID NO: 179639 - DNA, 17 bp, Arabidopsis thaliana
gtatccaagacataatt

SEQ ID NO: 179640 - DNA, 17 bp, Arabidopsis thaliana
gtatcccactgggtgtg

SEQ ID NO: 179641 - DNA, 17 bp, Arabidopsis thaliana
gtatcctgtagatggat

SEQ ID NO: 179642 - DNA, 17 bp, Arabidopsis thaliana
gtatcgccgaccgaagg

SEQ ID NO: 179643 - DNA, 17 bp, Arabidopsis thaliana
gtatctcagcaggcgaa

SEQ ID NO: 179644 - DNA, 17 bp, Arabidopsis thaliana
gtatctcagcaggcgat

SEQ ID NO: 179645 - DNA, 17 bp, Arabidopsis thaliana
gtatctctatgtggtta

SEQ ID NO: 179646 - DNA, 17 bp, Arabidopsis thaliana
gtatcttatgcgtccta

SEQ ID NO: 179647 - DNA, 17 bp, Arabidopsis thaliana
gtatgaacgaattcaga

SEQ ID NO: 179648 - DNA, 17 bp, Arabidopsis thaliana
gtatgatacatcggtgt

SEQ ID NO: 179649 - DNA, 17 bp, Arabidopsis thaliana
gtatgatgtcgatggcc

SEQ ID NO: 179650 - DNA, 17 bp, Arabidopsis thaliana
gtatgcgctggcgaaca

SEQ ID NO: 179651 - DNA, 17 bp, Arabidopsis thaliana
gtatgggtttagataca

SEQ ID NO: 179652 - DNA, 17 bp, Arabidopsis thaliana
gtatggtcgcaaggctg

SEQ ID NO: 179653 - DNA, 17 bp, Arabidopsis thaliana
gtatgtaagccatgtat

SEQ ID NO: 179654 - DNA, 17 bp, Arabidopsis thaliana
gtatgtcaagtccattc

SEQ ID NO: 179655 - DNA, 17 bp, Arabidopsis thaliana
gtatgttatgcgtccta

SEQ ID NO: 179656 - DNA, 17 bp, Arabidopsis thaliana
gtattagaccagatgtt

SEQ ID NO: 179657 - DNA, 17 bp, Arabidopsis thaliana
gtattcaacgagttcac

SEQ ID NO: 179658 - DNA, 17 bp, Arabidopsis thaliana
gtattcgggagacatgt

SEQ ID NO: 179659 - DNA, 17 bp, Arabidopsis thaliana
gtattctatccacttct

SEQ ID NO: 179660 - DNA, 17 bp, Arabidopsis thaliana
gtattgcagccaacagc

SEQ ID NO: 179661 - DNA, 17 bp, Arabidopsis thaliana
gtattgggagttgtaaa

SEQ ID NO: 179662 - DNA, 17 bp, Arabidopsis thaliana
gtattggtaactgaacc

SEQ ID NO: 179663 - DNA, 17 bp, Arabidopsis thaliana
gtatttgactcatgaaa

SEQ ID NO: 179664 - DNA, 17 bp, Arabidopsis thaliana
gtattttggcagtgttt

SEQ ID NO: 179665 - DNA, 17 bp, Arabidopsis thaliana
gtcaaaaggccgagaaa

SEQ ID NO: 179666 - DNA, 17 bp, Arabidopsis thaliana
gtcaaacatctactaga

SEQ ID NO: 179667 - DNA, 17 bp, Arabidopsis thaliana
gtcaacgcgagctgatg

SEQ ID NO: 179668 - DNA, 17 bp, Arabidopsis thaliana
gtcaacgcgagcttatg

SEQ ID NO: 179669 - DNA, 17 bp, Arabidopsis thaliana
gtcaacgtgatgatgga

SEQ ID NO: 179670 - DNA, 17 bp, Arabidopsis thaliana
gtcaactgaagcagccg

SEQ ID NO: 179671 - DNA, 17 bp, Arabidopsis thaliana
gtcaagaaaaaaagacc

SEQ ID NO: 179672 - DNA, 17 bp, Arabidopsis thaliana
gtcaagagcgggaggtg

SEQ ID NO: 179673 - DNA, 17 bp, Arabidopsis thaliana
gtcaagatggccgagtt

SEQ ID NO: 179674 - DNA, 17 bp, Arabidopsis thaliana
gtcaagctcaacagggt

SEQ ID NO: 179675 - DNA, 17 bp, Arabidopsis thaliana
gtcaagctctgcaacta

SEQ ID NO: 179676 - DNA, 17 bp, Arabidopsis thaliana
gtcaatatgtccgagtg

SEQ ID NO: 179677 - DNA, 17 bp, Arabidopsis thaliana
gtcaatggttaattttg

SEQ ID NO: 179678 - DNA, 17 bp, Arabidopsis thaliana
gtcacaagaaccacgct

SEQ ID NO: 179679 - DNA, 17 bp, Arabidopsis thaliana
gtcacacggaatcgaga

SEQ ID NO: 179680 - DNA, 17 bp, Arabidopsis thaliana
gtcacatcctgtagatg

SEQ ID NO: 179681 - DNA, 17 bp, Arabidopsis thaliana
gtcaccgcgatccgaac

SEQ ID NO: 179682 - DNA, 17 bp, Arabidopsis thaliana
gtcacttgggttgacca

SEQ ID NO: 179683 - DNA, 17 bp, Arabidopsis thaliana
gtcactttcactgcatt

SEQ ID NO: 179684 - DNA, 17 bp, Arabidopsis thaliana
gtcactttggccgagtg

SEQ ID NO: 179685 - DNA, 17 bp, Arabidopsis thaliana
gtcagaaaagttaccac

SEQ ID NO: 179686 - DNA, 17 bp, Arabidopsis thaliana
gtcagaaaccgggctag

SEQ ID NO: 179687 - DNA, 17 bp, Arabidopsis thaliana
gtcagaatccgggctag

SEQ ID NO: 179688 - DNA, 17 bp, Arabidopsis thaliana
gtcagacaaaatcgatc

SEQ ID NO: 179689 - DNA, 17 bp, Arabidopsis thaliana
gtcagactccttggtcc

SEQ ID NO: 179690 - DNA, 17 bp, Arabidopsis thaliana
gtcagaggagatgccaa

SEQ ID NO: 179691 - DNA, 17 bp, Arabidopsis thaliana
gtcagatctaattcaca

SEQ ID NO: 179692 - DNA, 17 bp, Arabidopsis thaliana
gtcagcggactgctcga

SEQ ID NO: 179693 - DNA, 17 bp, Arabidopsis thaliana
gtcaggatccgggctag

SEQ ID NO: 179694 - DNA, 17 bp, Arabidopsis thaliana
gtcaggatggccgagtg

SEQ ID NO: 179695 - DNA, 17 bp, Arabidopsis thaliana
gtcagggtggccgagtg

SEQ ID NO: 179696 - DNA, 17 bp, Arabidopsis thaliana
gtcaggttggccgagtg

SEQ ID NO: 179697 - DNA, 17 bp, Arabidopsis thaliana
gtcaggttgtccttggc

SEQ ID NO: 179698 - DNA, 17 bp, Arabidopsis thaliana
gtcagtatgagagggag

SEQ ID NO: 179699 - DNA, 17 bp, Arabidopsis thaliana
gtcagtatgagagggat

SEQ ID NO: 179700 - DNA, 17 bp, Arabidopsis thaliana
gtcagtatggccgagtg

SEQ ID NO: 179701 - DNA, 17 bp, Arabidopsis thaliana
gtcagtctctttggcta

SEQ ID NO: 179702 - DNA, 17 bp, Arabidopsis thaliana
gtcagttcggcaggcag

SEQ ID NO: 179703 - DNA, 17 bp, Arabidopsis thaliana
gtcagtttcgaccagtc

SEQ ID NO: 179704 - DNA, 17 bp, Arabidopsis thaliana
gtcataatccagcgcac

SEQ ID NO: 179705 - DNA, 17 bp, Arabidopsis thaliana
gtcataccttcagttct

SEQ ID NO: 179706 - DNA, 17 bp, Arabidopsis thaliana
gtcatagccgcatcctg

SEQ ID NO: 179707 - DNA, 17 bp, Arabidopsis thaliana
gtcatcagctcgcgttg

SEQ ID NO: 179708 - DNA, 17 bp, Arabidopsis thaliana
gtcatccttgcgcaggg

SEQ ID NO: 179709 - DNA, 17 bp, Arabidopsis thaliana
gtcatccttgcgcatgg

SEQ ID NO: 179710 - DNA, 17 bp, Arabidopsis thaliana
gtccaaaacagaacgac

SEQ ID NO: 179711 - DNA, 17 bp, Arabidopsis thaliana
gtccaacatagcgttcg

SEQ ID NO: 179712 - DNA, 17 bp, Arabidopsis thaliana
gtccaaggctaaataca

SEQ ID NO: 179713 - DNA, 17 bp, Arabidopsis thaliana
gtccaaggctaaatacg

SEQ ID NO: 179714 - DNA, 17 bp, Arabidopsis thaliana
gtccaataggatttgag

SEQ ID NO: 179715 - DNA, 17 bp, Arabidopsis thaliana
gtccaatctcactgcac

SEQ ID NO: 179716 - DNA, 17 bp, Arabidopsis thaliana
gtccagcggctggaaga

SEQ ID NO: 179717 - DNA, 17 bp, Arabidopsis thaliana
gtccatggtcctgcatt

SEQ ID NO: 179718 - DNA, 17 bp, Arabidopsis thaliana
gtccattcgctctcgtt

SEQ ID NO: 179719 - DNA, 17 bp, Arabidopsis thaliana
gtcccaaggctcgcttc

SEQ ID NO: 179720 - DNA, 17 bp, Arabidopsis thaliana
gtcccactgggtgtgcc

SEQ ID NO: 179721 - DNA, 17 bp, Arabidopsis thaliana
gtcccatcctgtagatt

SEQ ID NO: 179722 - DNA, 17 bp, Arabidopsis thaliana
gtccccgcctcagccga

SEQ ID NO: 179723 - DNA, 17 bp, Arabidopsis thaliana
gtcccgagttcgattct

SEQ ID NO: 179724 - DNA, 17 bp, Arabidopsis thaliana
gtcccgcatcagcaaag

SEQ ID NO: 179725 - DNA, 17 bp, Arabidopsis thaliana
gtcccgccaaagctcat

SEQ ID NO: 179726 - DNA, 17 bp, Arabidopsis thaliana
gtccctaagcaatcact

SEQ ID NO: 179727 - DNA, 17 bp, Arabidopsis thaliana
gtccctactgaattgtc

SEQ ID NO: 179728 - DNA, 17 bp, Arabidopsis thaliana
gtccctctaagaagccg

SEQ ID NO: 179729 - DNA, 17 bp, Arabidopsis thaliana
gtccctgccctttgtac

SEQ ID NO: 179730 - DNA, 17 bp, Arabidopsis thaliana
gtccctgcggatgctaa

SEQ ID NO: 179731 - DNA, 17 bp, Arabidopsis thaliana
gtccctgtagatggatc

SEQ ID NO: 179732 - DNA, 17 bp, Arabidopsis thaliana
gtccctttcgtccagtg

SEQ ID NO: 179733 - DNA, 17 bp, Arabidopsis thaliana
gtccgaacgacgctcgc

SEQ ID NO: 179734 - DNA, 17 bp, Arabidopsis thaliana
gtccgaacgacgcttcc

SEQ ID NO: 179735 - DNA, 17 bp, Arabidopsis thaliana
gtccgacgcggattacg

SEQ ID NO: 179736 - DNA, 17 bp, Arabidopsis thaliana
gtccgactttgtgaaat

SEQ ID NO: 179737 - DNA, 17 bp, Arabidopsis thaliana
gtccggtccactgtgaa

SEQ ID NO: 179738 - DNA, 17 bp, Arabidopsis thaliana
gtccggtgcccctcgcc

SEQ ID NO: 179739 - DNA, 17 bp, Arabidopsis thaliana
gtccgtatcctgccgtt

SEQ ID NO: 179740 - DNA, 17 bp, Arabidopsis thaliana
gtccgtcgatttgcaag

SEQ ID NO: 179741 - DNA, 17 bp, Arabidopsis thaliana
gtcctagtcgcatcctg

SEQ ID NO: 179742 - DNA, 17 bp, Arabidopsis thaliana
gtcctagtcgcatcctt

SEQ ID NO: 179743 - DNA, 17 bp, Arabidopsis thaliana
gtcctatactgagtgtt

SEQ ID NO: 179744 - DNA, 17 bp, Arabidopsis thaliana
gtcctcagcgacggacc

SEQ ID NO: 179745 - DNA, 17 bp, Arabidopsis thaliana
gtcctccactgcaagaa

SEQ ID NO: 179746 - DNA, 17 bp, Arabidopsis thaliana
gtcctcgtgttgcatcc

SEQ ID NO: 179747 - DNA, 17 bp, Arabidopsis thaliana
gtcctgaagtgtagagg

SEQ ID NO: 179748 - DNA, 17 bp, Arabidopsis thaliana
gtcctgttaccggcata

SEQ ID NO: 179749 - DNA, 17 bp, Arabidopsis thaliana
gtccttagtcgcatcct

SEQ ID NO: 179750 - DNA, 17 bp, Arabidopsis thaliana
gtccttatcaatctcgt

SEQ ID NO: 179751 - DNA, 17 bp, Arabidopsis thaliana
gtccttcgcgggcggac

SEQ ID NO: 179752 - DNA, 17 bp, Arabidopsis thaliana
gtccttctcggtgtcgt

SEQ ID NO: 179753 - DNA, 17 bp, Arabidopsis thaliana
gtccttgctaaccatga

SEQ ID NO: 179754 - DNA, 17 bp, Arabidopsis thaliana
gtccttggctcggatta

SEQ ID NO: 179755 - DNA, 17 bp, Arabidopsis thaliana
gtcgaaaagctgggtgt

SEQ ID NO: 179756 - DNA, 17 bp, Arabidopsis thaliana
gtcgaaatccgctaagg

SEQ ID NO: 179757 - DNA, 17 bp, Arabidopsis thaliana
gtcgaaattttgtctct

SEQ ID NO: 179758 - DNA, 17 bp, Arabidopsis thaliana
gtcgaactcagtaacgc

SEQ ID NO: 179759 - DNA, 17 bp, Arabidopsis thaliana
gtcgaccaggacgagga

SEQ ID NO: 179760 - DNA, 17 bp, Arabidopsis thaliana
gtcgactagaacgatct

SEQ ID NO: 179761 - DNA, 17 bp, Arabidopsis thaliana
gtcgactgttccttttc

SEQ ID NO: 179762 - DNA, 17 bp, Arabidopsis thaliana
gtcgaggagaatgggct

SEQ ID NO: 179763 - DNA, 17 bp, Arabidopsis thaliana
gtcgagtctacgaagct

SEQ ID NO: 179764 - DNA, 17 bp, Arabidopsis thaliana
gtcgatatgtccgagtg

SEQ ID NO: 179765 - DNA, 17 bp, Arabidopsis thaliana
gtcgatgaggatctaat

SEQ ID NO: 179766 - DNA, 17 bp, Arabidopsis thaliana
gtcgatgagtctgactg

SEQ ID NO: 179767 - DNA, 17 bp, Arabidopsis thaliana
gtcgatgagtctgattt

SEQ ID NO: 179768 - DNA, 17 bp, Arabidopsis thaliana
gtcgatggaacaatgta

SEQ ID NO: 179769 - DNA, 17 bp, Arabidopsis thaliana
gtcgattaagacagcag

SEQ ID NO: 179770 - DNA, 17 bp, Arabidopsis thaliana
gtcgcaacctgtagatg

SEQ ID NO: 179771 - DNA, 17 bp, Arabidopsis thaliana
gtcgcaaggctgaaact

SEQ ID NO: 179772 - DNA, 17 bp, Arabidopsis thaliana
gtcgcaaggctgaatga

SEQ ID NO: 179773 - DNA, 17 bp, Arabidopsis thaliana
gtcgcacctgtagatgg

SEQ ID NO: 179774 - DNA, 17 bp, Arabidopsis thaliana
gtcgcactgtagatgga

SEQ ID NO: 179775 - DNA, 17 bp, Arabidopsis thaliana
gtcgcatccagtagatg

SEQ ID NO: 179776 - DNA, 17 bp, Arabidopsis thaliana
gtcgcatccgtagatgg

SEQ ID NO: 179777 - DNA, 17 bp, Arabidopsis thaliana
gtcgcatcctgagatgg

SEQ ID NO: 179778 - DNA, 17 bp, Arabidopsis thaliana
gtcgcatcctgcagatg

SEQ ID NO: 179779 - DNA, 17 bp, Arabidopsis thaliana
gtcgcatcctgtagacg

SEQ ID NO: 179780 - DNA, 17 bp, Arabidopsis thaliana
gtcgcatcctgtagata

SEQ ID NO: 179781 - DNA, 17 bp, Arabidopsis thaliana
gtcgcatcctgtagatg

SEQ ID NO: 179782 - DNA, 17 bp, Arabidopsis thaliana
gtcgcatcctgtagatt

SEQ ID NO: 179783 - DNA, 17 bp, Arabidopsis thaliana
gtcgcatcctgtaggat

SEQ ID NO: 179784 - DNA, 17 bp, Arabidopsis thaliana
gtcgcatcctgtaggta

SEQ ID NO: 179785 - DNA, 17 bp, Arabidopsis thaliana
gtcgcatcctgtatatg

SEQ ID NO: 179786 - DNA, 17 bp, Arabidopsis thaliana
gtcgcatctgtagatgg

SEQ ID NO: 179787 - DNA, 17 bp, Arabidopsis thaliana
gtcgcattctgagatgg

SEQ ID NO: 179788 - DNA, 17 bp, Arabidopsis thaliana
gtcgcattctgtagatg

SEQ ID NO: 179789 - DNA, 17 bp, Arabidopsis thaliana
gtcgccatcctgtagat

SEQ ID NO: 179790 - DNA, 17 bp, Arabidopsis thaliana
gtcgccgcgatccgaac

SEQ ID NO: 179791 - DNA, 17 bp, Arabidopsis thaliana
gtcgcctatgcgttgca

SEQ ID NO: 179792 - DNA, 17 bp, Arabidopsis thaliana
gtcgcgagaagtccaca

SEQ ID NO: 179793 - DNA, 17 bp, Arabidopsis thaliana
gtcgcgattcttcccca

SEQ ID NO: 179794 - DNA, 17 bp, Arabidopsis thaliana
gtcgcgggcggcgaacc

SEQ ID NO: 179795 - DNA, 17 bp, Arabidopsis thaliana
gtcgctaagattcgatc

SEQ ID NO: 179796 - DNA, 17 bp, Arabidopsis thaliana
gtcgctatgaacgcttg

SEQ ID NO: 179797 - DNA, 17 bp, Arabidopsis thaliana
gtcgctctggccgagtg

SEQ ID NO: 179798 - DNA, 17 bp, Arabidopsis thaliana
gtcgctgctctgtgaaa

SEQ ID NO: 179799 - DNA, 17 bp, Arabidopsis thaliana
gtcgctggttcgtttcc

SEQ ID NO: 179800 - DNA, 17 bp, Arabidopsis thaliana
gtcgctgtcatcttctt

SEQ ID NO: 179801 - DNA, 17 bp, Arabidopsis thaliana
gtcgcttcctgtagatg

SEQ ID NO: 179802 - DNA, 17 bp, Arabidopsis thaliana
gtcgcttggccgagtgg

SEQ ID NO: 179803 - DNA, 17 bp, Arabidopsis thaliana
gtcgctttagccgagtg

SEQ ID NO: 179804 - DNA, 17 bp, Arabidopsis thaliana
gtcgctttgaccgagtg

SEQ ID NO: 179805 - DNA, 17 bp, Arabidopsis thaliana
gtcgctttggccgaccg

SEQ ID NO: 179806 - DNA, 17 bp, Arabidopsis thaliana
gtcgctttggccgagcg

SEQ ID NO: 179807 - DNA, 17 bp, Arabidopsis thaliana
gtcgctttggccgagta

SEQ ID NO: 179808 - DNA, 17 bp, Arabidopsis thaliana
gtcgctttggccgagtg

SEQ ID NO: 179809 - DNA, 17 bp, Arabidopsis thaliana
gtcgctttggctgagtg

SEQ ID NO: 179810 - DNA, 17 bp, Arabidopsis thaliana
gtcgctttgtccgagtg

SEQ ID NO: 179811 - DNA, 17 bp, Arabidopsis thaliana
gtcgcttttgccgtgtg

SEQ ID NO: 179812 - DNA, 17 bp, Arabidopsis thaliana
gtcggaatacgaacgga

SEQ ID NO: 179813 - DNA, 17 bp, Arabidopsis thaliana
gtcggaccaggctcact

SEQ ID NO: 179814 - DNA, 17 bp, Arabidopsis thaliana
gtcggaccaggcttcat

SEQ ID NO: 179815 - DNA, 17 bp, Arabidopsis thaliana
gtcggaccaggcttgct

SEQ ID NO: 179816 - DNA, 17 bp, Arabidopsis thaliana
gtcggatccggcagaga

SEQ ID NO: 179817 - DNA, 17 bp, Arabidopsis thaliana
gtcggatgcgaaacggt

SEQ ID NO: 179818 - DNA, 17 bp, Arabidopsis thaliana
gtcggatgcggaacgga

SEQ ID NO: 179819 - DNA, 17 bp, Arabidopsis thaliana
gtcggatttgacccggc

SEQ ID NO: 179820 - DNA, 17 bp, Arabidopsis thaliana
gtcggattttttctttt

SEQ ID NO: 179821 - DNA, 17 bp, Arabidopsis thaliana
gtcggcaaaatggatcc

SEQ ID NO: 179822 - DNA, 17 bp, Arabidopsis thaliana
gtcggcaatcgggcggc

SEQ ID NO: 179823 - DNA, 17 bp, Arabidopsis thaliana
gtcggcaatcggggcgg

SEQ ID NO: 179824 - DNA, 17 bp, Arabidopsis thaliana
gtcggcaatcgggtggc

SEQ ID NO: 179825 - DNA, 17 bp, Arabidopsis thaliana
gtcggcagtccctgtct

SEQ ID NO: 179826 - DNA, 17 bp, Arabidopsis thaliana
gtcggccaaggtgtgaa

SEQ ID NO: 179827 - DNA, 17 bp, Arabidopsis thaliana
gtcggccagtgagacgg

SEQ ID NO: 179828 - DNA, 17 bp, Arabidopsis thaliana
gtcggccggtccgcccg

SEQ ID NO: 179829 - DNA, 17 bp, Arabidopsis thaliana
gtcggccggtccgcctt

SEQ ID NO: 179830 - DNA, 17 bp, Arabidopsis thaliana
gtcggccggttcgcctt

SEQ ID NO: 179831 - DNA, 17 bp, Arabidopsis thaliana
gtcggcgatacgctcca

SEQ ID NO: 179832 - DNA, 17 bp, Arabidopsis thaliana
gtcggcgatacgctcct

SEQ ID NO: 179833 - DNA, 17 bp, Arabidopsis thaliana
gtcggcgatacgctcgc

SEQ ID NO: 179834 - DNA, 17 bp, Arabidopsis thaliana
gtcggcggtggagtgag

SEQ ID NO: 179835 - DNA, 17 bp, Arabidopsis thaliana
gtcggctgctttgttga

SEQ ID NO: 179836 - DNA, 17 bp, Arabidopsis thaliana
gtcggctgtcagcggac

SEQ ID NO: 179837 - DNA, 17 bp, Arabidopsis thaliana
gtcggcttgtcccttcg

SEQ ID NO: 179838 - DNA, 17 bp, Arabidopsis thaliana
gtcgggacccgaaagaa

SEQ ID NO: 179839 - DNA, 17 bp, Arabidopsis thaliana
gtcgggacccgaaagat

SEQ ID NO: 179840 - DNA, 17 bp, Arabidopsis thaliana
gtcgggagggaagcgga

SEQ ID NO: 179841 - DNA, 17 bp, Arabidopsis thaliana
gtcgtactcataaccgc

SEQ ID NO: 179842 - DNA, 17 bp, Arabidopsis thaliana
gtcgtagtcgcatcctg

SEQ ID NO: 179843 - DNA, 17 bp, Arabidopsis thaliana
gtcgtatctgtagatgg

SEQ ID NO: 179844 - DNA, 17 bp, Arabidopsis thaliana
gtcgtccctcaccatcc

SEQ ID NO: 179845 - DNA, 17 bp, Arabidopsis thaliana
gtcgtcgccgtattgtg

SEQ ID NO: 179846 - DNA, 17 bp, Arabidopsis thaliana
gtcgtcgcgggcggcga

SEQ ID NO: 179847 - DNA, 17 bp, Arabidopsis thaliana
gtcgtcggaccaggctt

SEQ ID NO: 179848 - DNA, 17 bp, Arabidopsis thaliana
gtcgtctaaagaacaga

SEQ ID NO: 179849 - DNA, 17 bp, Arabidopsis thaliana
gtcgtctaaagaacagt

SEQ ID NO: 179850 - DNA, 17 bp, Arabidopsis thaliana
gtcgtctatgagagtac

SEQ ID NO: 179851 - DNA, 17 bp, Arabidopsis thaliana
gtcgtctttccactaag

SEQ ID NO: 179852 - DNA, 17 bp, Arabidopsis thaliana
gtcgtctttgagactgg

SEQ ID NO: 179853 - DNA, 17 bp, Arabidopsis thaliana
gtcgtgagacaggttag

SEQ ID NO: 179854 - DNA, 17 bp, Arabidopsis thaliana
gtcgtgcccggaccctg

SEQ ID NO: 179855 - DNA, 17 bp, Arabidopsis thaliana
gtcgtgggagctaagag

SEQ ID NO: 179856 - DNA, 17 bp, Arabidopsis thaliana
gtcgtgggttcgtgccc

SEQ ID NO: 179857 - DNA, 17 bp, Arabidopsis thaliana
gtcgttctgttttggac

SEQ ID NO: 179858 - DNA, 17 bp, Arabidopsis thaliana
gtcgttggctaagtccg

SEQ ID NO: 179859 - DNA, 17 bp, Arabidopsis thaliana
gtcgttgtagtatagtg

SEQ ID NO: 179860 - DNA, 17 bp, Arabidopsis thaliana
gtcgttttggccgagtg

SEQ ID NO: 179861 - DNA, 17 bp, Arabidopsis thaliana
gtctaaagaacagttgc

SEQ ID NO: 179862 - DNA, 17 bp, Arabidopsis thaliana
gtctaagtcatgcttgc

SEQ ID NO: 179863 - DNA, 17 bp, Arabidopsis thaliana
gtctaagtccgcatcct

SEQ ID NO: 179864 - DNA, 17 bp, Arabidopsis thaliana
gtctaatctagattttc

SEQ ID NO: 179865 - DNA, 17 bp, Arabidopsis thaliana
gtctacaaaaaagttca

SEQ ID NO: 179866 - DNA, 17 bp, Arabidopsis thaliana
gtctacaaaaaagttcc

SEQ ID NO: 179867 - DNA, 17 bp, Arabidopsis thaliana
gtctacagctccccacc

SEQ ID NO: 179868 - DNA, 17 bp, Arabidopsis thaliana
gtctaggcctccgttat

SEQ ID NO: 179869 - DNA, 17 bp, Arabidopsis thaliana
gtctagtcgcatcctgt

SEQ ID NO: 179870 - DNA, 17 bp, Arabidopsis thaliana
gtctagtcgcatctgta

SEQ ID NO: 179871 - DNA, 17 bp, Arabidopsis thaliana
gtctatcagatctggtg

SEQ ID NO: 179872 - DNA, 17 bp, Arabidopsis thaliana
gtctatccgggcggagg

SEQ ID NO: 179873 - DNA, 17 bp, Arabidopsis thaliana
gtctcaaaaaatctatc

SEQ ID NO: 179874 - DNA, 17 bp, Arabidopsis thaliana
gtctcaaccataaacga

SEQ ID NO: 179875 - DNA, 17 bp, Arabidopsis thaliana
gtctcagcgcatcctgt

SEQ ID NO: 179876 - DNA, 17 bp, Arabidopsis thaliana
gtctcaggcacagctgt

SEQ ID NO: 179877 - DNA, 17 bp, Arabidopsis thaliana
gtctcagtcgcatcctg

SEQ ID NO: 179878 - DNA, 17 bp, Arabidopsis thaliana
gtctcatcagggtcgag

SEQ ID NO: 179879 - DNA, 17 bp, Arabidopsis thaliana
gtctccaaggtgaacag

SEQ ID NO: 179880 - DNA, 17 bp, Arabidopsis thaliana
gtctcccggcagacgca

SEQ ID NO: 179881 - DNA, 17 bp, Arabidopsis thaliana
gtctccgacatggaccc

SEQ ID NO: 179882 - DNA, 17 bp, Arabidopsis thaliana
gtctccgcaaagtcgta

SEQ ID NO: 179883 - DNA, 17 bp, Arabidopsis thaliana
gtctccggtggatcagg

SEQ ID NO: 179884 - DNA, 17 bp, Arabidopsis thaliana
gtctccttgtgcttctt

SEQ ID NO: 179885 - DNA, 17 bp, Arabidopsis thaliana
gtctcggacctggtcga

SEQ ID NO: 179886 - DNA, 17 bp, Arabidopsis thaliana
gtctcggtgggacctcc

SEQ ID NO: 179887 - DNA, 17 bp, Arabidopsis thaliana
gtctcggttcgcgatcc

SEQ ID NO: 179888 - DNA, 17 bp, Arabidopsis thaliana
gtctcgtcgtagtttgg

SEQ ID NO: 179889 - DNA, 17 bp, Arabidopsis thaliana
gtctcgttgttgttgga

SEQ ID NO: 179890 - DNA, 17 bp, Arabidopsis thaliana
gtctctactgttgtgag

SEQ ID NO: 179891 - DNA, 17 bp, Arabidopsis thaliana
gtctctctgatcgtaac

SEQ ID NO: 179892 - DNA, 17 bp, Arabidopsis thaliana
gtctcttcccgcaggct

SEQ ID NO: 179893 - DNA, 17 bp, Arabidopsis thaliana
gtctcttgtagttgctg

SEQ ID NO: 179894 - DNA, 17 bp, Arabidopsis thaliana
gtctcttgtgaattaga

SEQ ID NO: 179895 - DNA, 17 bp, Arabidopsis thaliana
gtctcttttacaaggtg

SEQ ID NO: 179896 - DNA, 17 bp, Arabidopsis thaliana
gtctgacaggtcccttt

SEQ ID NO: 179897 - DNA, 17 bp, Arabidopsis thaliana
gtctgacggcagatcca

SEQ ID NO: 179898 - DNA, 17 bp, Arabidopsis thaliana
gtctgatcaggcattgc

SEQ ID NO: 179899 - DNA, 17 bp, Arabidopsis thaliana
gtctgcaatcgggcggc

SEQ ID NO: 179900 - DNA, 17 bp, Arabidopsis thaliana
gtctgccgggagccgga

SEQ ID NO: 179901 - DNA, 17 bp, Arabidopsis thaliana
gtctgccgggagccggg

SEQ ID NO: 179902 - DNA, 17 bp, Arabidopsis thaliana
gtctgcctgggtgtcac

SEQ ID NO: 179903 - DNA, 17 bp, Arabidopsis thaliana
gtctggaacatggacca

SEQ ID NO: 179904 - DNA, 17 bp, Arabidopsis thaliana
gtctggagaagcgtcca

SEQ ID NO: 179905 - DNA, 17 bp, Arabidopsis thaliana
gtctggagaagcgtcct

SEQ ID NO: 179906 - DNA, 17 bp, Arabidopsis thaliana
gtctggagaagcgtgcg

SEQ ID NO: 179907 - DNA, 17 bp, Arabidopsis thaliana
gtctgggtagtgtagtc

SEQ ID NO: 179908 - DNA, 17 bp, Arabidopsis thaliana
gtctgggtcgtgtagtc

SEQ ID NO: 179909 - DNA, 17 bp, Arabidopsis thaliana
gtctgggtggtgtagta

SEQ ID NO: 179910 - DNA, 17 bp, Arabidopsis thaliana
gtctgggtggtgtagtc

SEQ ID NO: 179911 - DNA, 17 bp, Arabidopsis thaliana
gtctggtaattggaatg

SEQ ID NO: 179912 - DNA, 17 bp, Arabidopsis thaliana
gtctggtgccagcagcc

SEQ ID NO: 179913 - DNA, 17 bp, Arabidopsis thaliana
gtctggtgtccgggtct

SEQ ID NO: 179914 - DNA, 17 bp, Arabidopsis thaliana
gtctgtagtccaacggt

SEQ ID NO: 179915 - DNA, 17 bp, Arabidopsis thaliana
gtctgtgacaagtattc

SEQ ID NO: 179916 - DNA, 17 bp, Arabidopsis thaliana
gtctgtgatgcccttag

SEQ ID NO: 179917 - DNA, 17 bp, Arabidopsis thaliana
gtcttaagcgcatcctg

SEQ ID NO: 179918 - DNA, 17 bp, Arabidopsis thaliana
gtcttaagtcgcatcct

SEQ ID NO: 179919 - DNA, 17 bp, Arabidopsis thaliana
gtcttaatcgcatcctg

SEQ ID NO: 179920 - DNA, 17 bp, Arabidopsis thaliana
gtcttaattggccgggt

SEQ ID NO: 179921 - DNA, 17 bp, Arabidopsis thaliana
gtcttagccgcatccta

SEQ ID NO: 179922 - DNA, 17 bp, Arabidopsis thaliana
gtcttagccgcatcctg

SEQ ID NO: 179923 - DNA, 17 bp, Arabidopsis thaliana
gtcttaggcgcatcctg

SEQ ID NO: 179924 - DNA, 17 bp, Arabidopsis thaliana
gtcttagtcacatcctg

SEQ ID NO: 179925 - DNA, 17 bp, Arabidopsis thaliana
gtcttagtcatcctgta

SEQ ID NO: 179926 - DNA, 17 bp, Arabidopsis thaliana
gtcttagtccatctcgt

SEQ ID NO: 179927 - DNA, 17 bp, Arabidopsis thaliana
gtcttagtcgcaaccta

SEQ ID NO: 179928 - DNA, 17 bp, Arabidopsis thaliana
gtcttagtcgcaacctg

SEQ ID NO: 179929 - DNA, 17 bp, Arabidopsis thaliana
gtcttagtcgcaccctg

SEQ ID NO: 179930 - DNA, 17 bp, Arabidopsis thaliana
gtcttagtcgcactgta

SEQ ID NO: 179931 - DNA, 17 bp, Arabidopsis thaliana
gtcttagtcgcatcaga

SEQ ID NO: 179932 - DNA, 17 bp, Arabidopsis thaliana
gtcttagtcgcatccag

SEQ ID NO: 179933 - DNA, 17 bp, Arabidopsis thaliana
gtcttagtcgcatccat

SEQ ID NO: 179934 - DNA, 17 bp, Arabidopsis thaliana
gtcttagtcgcatcccg

SEQ ID NO: 179935 - DNA, 17 bp, Arabidopsis thaliana
gtcttagtcgcatccgt

SEQ ID NO: 179936 - DNA, 17 bp, Arabidopsis thaliana
gtcttagtcgcatccta

SEQ ID NO: 179937 - DNA, 17 bp, Arabidopsis thaliana
gtcttagtcgcatcctg

SEQ ID NO: 179938 - DNA, 17 bp, Arabidopsis thaliana
gtcttagtcgcatcctt

SEQ ID NO: 179939 - DNA, 17 bp, Arabidopsis thaliana
gtcttagtcgcatcgtg

SEQ ID NO: 179940 - DNA, 17 bp, Arabidopsis thaliana
gtcttagtcgcatctag

SEQ ID NO: 179941 - DNA, 17 bp, Arabidopsis thaliana
gtcttagtcgcatctgt

SEQ ID NO: 179942 - DNA, 17 bp, Arabidopsis thaliana
gtcttagtcgcattcct

SEQ ID NO: 179943 - DNA, 17 bp, Arabidopsis thaliana
gtcttagtcgcattctg

SEQ ID NO: 179944 - DNA, 17 bp, Arabidopsis thaliana
gtcttagtcgccctgta

SEQ ID NO: 179945 - DNA, 17 bp, Arabidopsis thaliana
gtcttagtcgcgccctg

SEQ ID NO: 179946 - DNA, 17 bp, Arabidopsis thaliana
gtcttagtcgcgctgta

SEQ ID NO: 179947 - DNA, 17 bp, Arabidopsis thaliana
gtcttagtcgctcctgt

SEQ ID NO: 179948 - DNA, 17 bp, Arabidopsis thaliana
gtcttagtcgctccttt

SEQ ID NO: 179949 - DNA, 17 bp, Arabidopsis thaliana
gtcttagtcgctgtaga

SEQ ID NO: 179950 - DNA, 17 bp, Arabidopsis thaliana
gtcttagtcgcttcctg

SEQ ID NO: 179951 - DNA, 17 bp, Arabidopsis thaliana
gtcttagtcgtatcctg

SEQ ID NO: 179952 - DNA, 17 bp, Arabidopsis thaliana
gtcttagttgcatcctg

SEQ ID NO: 179953 - DNA, 17 bp, Arabidopsis thaliana
gtcttattcgcatcctg

SEQ ID NO: 179954 - DNA, 17 bp, Arabidopsis thaliana
gtcttattcgcgtcctg

SEQ ID NO: 179955 - DNA, 17 bp, Arabidopsis thaliana
gtcttcatgggtgtggc

SEQ ID NO: 179956 - DNA, 17 bp, Arabidopsis thaliana
gtcttcattcgggggat

SEQ ID NO: 179957 - DNA, 17 bp, Arabidopsis thaliana
gtcttcgagcccccaac

SEQ ID NO: 179958 - DNA, 17 bp, Arabidopsis thaliana
gtcttcgcatcctgtag

SEQ ID NO: 179959 - DNA, 17 bp, Arabidopsis thaliana
gtcttcggaccaggctt

SEQ ID NO: 179960 - DNA, 17 bp, Arabidopsis thaliana
gtcttcgtcgcatcctg

SEQ ID NO: 179961 - DNA, 17 bp, Arabidopsis thaliana
gtcttgaatcaaaataa

SEQ ID NO: 179962 - DNA, 17 bp, Arabidopsis thaliana
gtcttgtcgcatcctgt

SEQ ID NO: 179963 - DNA, 17 bp, Arabidopsis thaliana
gtctttagtcgcatcct

SEQ ID NO: 179964 - DNA, 17 bp, Arabidopsis thaliana
gtctttattagtgagac

SEQ ID NO: 179965 - DNA, 17 bp, Arabidopsis thaliana
gtctttcataaatccaa

SEQ ID NO: 179966 - DNA, 17 bp, Arabidopsis thaliana
gtctttccactaagcag

SEQ ID NO: 179967 - DNA, 17 bp, Arabidopsis thaliana
gtctttccgctaagcag

SEQ ID NO: 179968 - DNA, 17 bp, Arabidopsis thaliana
gtctttgattgctttct

SEQ ID NO: 179969 - DNA, 17 bp, Arabidopsis thaliana
gtctttggctttgtgtc

SEQ ID NO: 179970 - DNA, 17 bp, Arabidopsis thaliana
gtctttttttttttcta

SEQ ID NO: 179971 - DNA, 17 bp, Arabidopsis thaliana
gtgaaacataatctagg

SEQ ID NO: 179972 - DNA, 17 bp, Arabidopsis thaliana
gtgaaactgcgaatggc

SEQ ID NO: 179973 - DNA, 17 bp, Arabidopsis thaliana
gtgaaagcgtggcctat

SEQ ID NO: 179974 - DNA, 17 bp, Arabidopsis thaliana
gtgaaagctgacgccac

SEQ ID NO: 179975 - DNA, 17 bp, Arabidopsis thaliana
gtgaaatgacttgagaa

SEQ ID NO: 179976 - DNA, 17 bp, Arabidopsis thaliana
gtgaaatgacttgagag

SEQ ID NO: 179977 - DNA, 17 bp, Arabidopsis thaliana
gtgaacctgcggaagga

SEQ ID NO: 179978 - DNA, 17 bp, Arabidopsis thaliana
gtgaaccttgggatggg

SEQ ID NO: 179979 - DNA, 17 bp, Arabidopsis thaliana
gtgaactatgcctgagc

SEQ ID NO: 179980 - DNA, 17 bp, Arabidopsis thaliana
gtgaactgcttggtggg

SEQ ID NO: 179981 - DNA, 17 bp, Arabidopsis thaliana
gtgaagaggacttggaa

SEQ ID NO: 179982 - DNA, 17 bp, Arabidopsis thaliana
gtgaagatccgttcttg

SEQ ID NO: 179983 - DNA, 17 bp, Arabidopsis thaliana
gtgaagtgttcggatca

SEQ ID NO: 179984 - DNA, 17 bp, Arabidopsis thaliana
gtgaagtgttcggatcg

SEQ ID NO: 179985 - DNA, 17 bp, Arabidopsis thaliana
gtgaatggttagatacc

SEQ ID NO: 179986 - DNA, 17 bp, Arabidopsis thaliana
gtgacagagccgcatca

SEQ ID NO: 179987 - DNA, 17 bp, Arabidopsis thaliana
gtgaccaccactgatca

SEQ ID NO: 179988 - DNA, 17 bp, Arabidopsis thaliana
gtgaccatgtcgcagat

SEQ ID NO: 179989 - DNA, 17 bp, Arabidopsis thaliana
gtgaccatgttgcagat

SEQ ID NO: 179990 - DNA, 17 bp, Arabidopsis thaliana
gtgacctgcccgggtcg

SEQ ID NO: 179991 - DNA, 17 bp, Arabidopsis thaliana
gtgacgacagagtccga

SEQ ID NO: 179992 - DNA, 17 bp, Arabidopsis thaliana
gtgacgacgacgtcgag

SEQ ID NO: 179993 - DNA, 17 bp, Arabidopsis thaliana
gtgacggtatctctcct

SEQ ID NO: 179994 - DNA, 17 bp, Arabidopsis thaliana
gtgagaaatctgctagt

SEQ ID NO: 179995 - DNA, 17 bp, Arabidopsis thaliana
gtgagaaatctgcttag

SEQ ID NO: 179996 - DNA, 17 bp, Arabidopsis thaliana
gtgagaactgttatccc

SEQ ID NO: 179997 - DNA, 17 bp, Arabidopsis thaliana
gtgagacgctataactc

SEQ ID NO: 179998 - DNA, 17 bp, Arabidopsis thaliana
gtgagagatttagacac

SEQ ID NO: 179999 - DNA, 17 bp, Arabidopsis thaliana
gtgagcatgcctgtcgg

SEQ ID NO: 180000 - DNA, 17 bp, Arabidopsis thaliana
gtgagtatgactgcaga

SEQ ID NO: 180001 - DNA, 17 bp, Arabidopsis thaliana
gtgagtttcttcttgtt

SEQ ID NO: 180002 - DNA, 17 bp, Arabidopsis thaliana
gtgatagccctgtagat

SEQ ID NO: 180003 - DNA, 17 bp, Arabidopsis thaliana
gtgatcactgttgtgca

SEQ ID NO: 180004 - DNA, 17 bp, Arabidopsis thaliana
gtgatctacaacactat

SEQ ID NO: 180005 - DNA, 17 bp, Arabidopsis thaliana
gtgatgacttgagaggt

SEQ ID NO: 180006 - DNA, 17 bp, Arabidopsis thaliana
gtgatgcccttagatgt

SEQ ID NO: 180007 - DNA, 17 bp, Arabidopsis thaliana
gtgatggatgggctagc

SEQ ID NO: 180008 - DNA, 17 bp, Arabidopsis thaliana
gtgatggggatagatca

SEQ ID NO: 180009 - DNA, 17 bp, Arabidopsis thaliana
gtgattcctcgggcagt

SEQ ID NO: 180010 - DNA, 17 bp, Arabidopsis thaliana
gtgattctgcccaaatg

SEQ ID NO: 180011 - DNA, 17 bp, Arabidopsis thaliana
gtgattgtgtagggtct

SEQ ID NO: 180012 - DNA, 17 bp, Arabidopsis thaliana
gtgatttctgcccagtg

SEQ ID NO: 180013 - DNA, 17 bp, Arabidopsis thaliana
gtgatttgacggtgccg

SEQ ID NO: 180014 - DNA, 17 bp, Arabidopsis thaliana
gtgcaaatattgtccct

SEQ ID NO: 180015 - DNA, 17 bp, Arabidopsis thaliana
gtgcaaatgctttctac

SEQ ID NO: 180016 - DNA, 17 bp, Arabidopsis thaliana
gtgcaagaggtcccggg

SEQ ID NO: 180017 - DNA, 17 bp, Arabidopsis thaliana
gtgcagtgatgatgggt

SEQ ID NO: 180018 - DNA, 17 bp, Arabidopsis thaliana
gtgcatcagatggaaat

SEQ ID NO: 180019 - DNA, 17 bp, Arabidopsis thaliana
gtgcattggtcggcttg

SEQ ID NO: 180020 - DNA, 17 bp, Arabidopsis thaliana
gtgccaagctatgagga

SEQ ID NO: 180021 - DNA, 17 bp, Arabidopsis thaliana
gtgccagacaacattcc

SEQ ID NO: 180022 - DNA, 17 bp, Arabidopsis thaliana
gtgccctgcttctccag

SEQ ID NO: 180023 - DNA, 17 bp, Arabidopsis thaliana
gtgccgccccagccaaa

SEQ ID NO: 180024 - DNA, 17 bp, Arabidopsis thaliana
gtgccggggttttgtga

SEQ ID NO: 180025 - DNA, 17 bp, Arabidopsis thaliana
gtgccggtgatgtatat

SEQ ID NO: 180026 - DNA, 17 bp, Arabidopsis thaliana
gtgccgtagagataacc

SEQ ID NO: 180027 - DNA, 17 bp, Arabidopsis thaliana
gtgcctctaccgtatcc

SEQ ID NO: 180028 - DNA, 17 bp, Arabidopsis thaliana
gtgcctctctcacccca

SEQ ID NO: 180029 - DNA, 17 bp, Arabidopsis thaliana
gtgcctggctccctgta

SEQ ID NO: 180030 - DNA, 17 bp, Arabidopsis thaliana
gtgcctgggccggatca

SEQ ID NO: 180031 - DNA, 17 bp, Arabidopsis thaliana
gtgcctttgggagccta

SEQ ID NO: 180032 - DNA, 17 bp, Arabidopsis thaliana
gtgcgacagggtccgat

SEQ ID NO: 180033 - DNA, 17 bp, Arabidopsis thaliana
gtgcgagtcaacgggtg

SEQ ID NO: 180034 - DNA, 17 bp, Arabidopsis thaliana
gtgcgatatgttgcgaa

SEQ ID NO: 180035 - DNA, 17 bp, Arabidopsis thaliana
gtgcgctggattatgaa

SEQ ID NO: 180036 - DNA, 17 bp, Arabidopsis thaliana
gtgcgctggattatgac

SEQ ID NO: 180037 - DNA, 17 bp, Arabidopsis thaliana
gtgcgttcccgtctatc

SEQ ID NO: 180038 - DNA, 17 bp, Arabidopsis thaliana
gtgctaaaacactctcc

SEQ ID NO: 180039 - DNA, 17 bp, Arabidopsis thaliana
gtgctatcgggagaatg

SEQ ID NO: 180040 - DNA, 17 bp, Arabidopsis thaliana
gtgctcaaagcaagcca

SEQ ID NO: 180041 - DNA, 17 bp, Arabidopsis thaliana
gtgctcaaagcaagcct

SEQ ID NO: 180042 - DNA, 17 bp, Arabidopsis thaliana
gtgctcaggtgctttgg

SEQ ID NO: 180043 - DNA, 17 bp, Arabidopsis thaliana
gtgctcattttgttata

SEQ ID NO: 180044 - DNA, 17 bp, Arabidopsis thaliana
gtgctcgtgcgtgctcg

SEQ ID NO: 180045 - DNA, 17 bp, Arabidopsis thaliana
gtgctggcagcttcaga

SEQ ID NO: 180046 - DNA, 17 bp, Arabidopsis thaliana
gtgcttaaagcttgtgg

SEQ ID NO: 180047 - DNA, 17 bp, Arabidopsis thaliana
gtgcttagcctaaggtc

SEQ ID NO: 180048 - DNA, 17 bp, Arabidopsis thaliana
gtgcttagcctgtacga

SEQ ID NO: 180049 - DNA, 17 bp, Arabidopsis thaliana
gtgcttgtcgacggttg

SEQ ID NO: 180050 - DNA, 17 bp, Arabidopsis thaliana
gtgcttgtggactgctt

SEQ ID NO: 180051 - DNA, 17 bp, Arabidopsis thaliana
gtgcttgtttgtttatt

SEQ ID NO: 180052 - DNA, 17 bp, Arabidopsis thaliana
gtggaaagacgacactt

SEQ ID NO: 180053 - DNA, 17 bp, Arabidopsis thaliana
gtggaagaggagggacg

SEQ ID NO: 180054 - DNA, 17 bp, Arabidopsis thaliana
gtggaaggacggccatt

SEQ ID NO: 180055 - DNA, 17 bp, Arabidopsis thaliana
gtggaaggataacggga

SEQ ID NO: 180056 - DNA, 17 bp, Arabidopsis thaliana
gtggaaggataacgggc

SEQ ID NO: 180057 - DNA, 17 bp, Arabidopsis thaliana
gtggaagtccgcttggc

SEQ ID NO: 180058 - DNA, 17 bp, Arabidopsis thaliana
gtggacagccggtggag

SEQ ID NO: 180059 - DNA, 17 bp, Arabidopsis thaliana
gtggacagcgggtttcg

SEQ ID NO: 180060 - DNA, 17 bp, Arabidopsis thaliana
gtggaccgacgcggatt

SEQ ID NO: 180061 - DNA, 17 bp, Arabidopsis thaliana
gtggacgatgcacatgt

SEQ ID NO: 180062 - DNA, 17 bp, Arabidopsis thaliana
gtggacggatcacagct

SEQ ID NO: 180063 - DNA, 17 bp, Arabidopsis thaliana
gtggacgtgccggagtg

SEQ ID NO: 180064 - DNA, 17 bp, Arabidopsis thaliana
gtggactgcttggtgag

SEQ ID NO: 180065 - DNA, 17 bp, Arabidopsis thaliana
gtggactgcttggtggg

SEQ ID NO: 180066 - DNA, 17 bp, Arabidopsis thaliana
gtggacttctcgcgacg

SEQ ID NO: 180067 - DNA, 17 bp, Arabidopsis thaliana
gtggagaactggaccgc

SEQ ID NO: 180068 - DNA, 17 bp, Arabidopsis thaliana
gtggagacctgggctcg

SEQ ID NO: 180069 - DNA, 17 bp, Arabidopsis thaliana
gtggagacgtcgctgcc

SEQ ID NO: 180070 - DNA, 17 bp, Arabidopsis thaliana
gtggagcgatttgtctg

SEQ ID NO: 180071 - DNA, 17 bp, Arabidopsis thaliana
gtggagggcaatgcgtg

SEQ ID NO: 180072 - DNA, 17 bp, Arabidopsis thaliana
gtggatacactgtggca

SEQ ID NO: 180073 - DNA, 17 bp, Arabidopsis thaliana
gtggatcgtggcagcaa

SEQ ID NO: 180074 - DNA, 17 bp, Arabidopsis thaliana
gtggatttggtgtcgtc

SEQ ID NO: 180075 - DNA, 17 bp, Arabidopsis thaliana
gtggcagagtggccttg

SEQ ID NO: 180076 - DNA, 17 bp, Arabidopsis thaliana
gtggcagccaagcgttc

SEQ ID NO: 180077 - DNA, 17 bp, Arabidopsis thaliana
gtggcagcggcgcagga

SEQ ID NO: 180078 - DNA, 17 bp, Arabidopsis thaliana
gtggcatcaccaagata

SEQ ID NO: 180079 - DNA, 17 bp, Arabidopsis thaliana
gtggcatcaccaagatt

SEQ ID NO: 180080 - DNA, 17 bp, Arabidopsis thaliana
gtggcatcatcaagata

SEQ ID NO: 180081 - DNA, 17 bp, Arabidopsis thaliana
gtggcatcatcaagatt

SEQ ID NO: 180082 - DNA, 17 bp, Arabidopsis thaliana
gtggccggtccaatcac

SEQ ID NO: 180083 - DNA, 17 bp, Arabidopsis thaliana
gtggcgcagcggaagcg

SEQ ID NO: 180084 - DNA, 17 bp, Arabidopsis thaliana
gtggcggcctaagcccg

SEQ ID NO: 180085 - DNA, 17 bp, Arabidopsis thaliana
gtggctagattctcaac

SEQ ID NO: 180086 - DNA, 17 bp, Arabidopsis thaliana
gtggctcagtggtttaa

SEQ ID NO: 180087 - DNA, 17 bp, Arabidopsis thaliana
gtggcttggaacagcgg

SEQ ID NO: 180088 - DNA, 17 bp, Arabidopsis thaliana
gtgggacctgcgaaaga

SEQ ID NO: 180089 - DNA, 17 bp, Arabidopsis thaliana
gtgggccatttttggta

SEQ ID NO: 180090 - DNA, 17 bp, Arabidopsis thaliana
gtgggccgggttcttag

SEQ ID NO: 180091 - DNA, 17 bp, Arabidopsis thaliana
gtgggcttcttctacag

SEQ ID NO: 180092 - DNA, 17 bp, Arabidopsis thaliana
gtgggctttgcccgcgc

SEQ ID NO: 180093 - DNA, 17 bp, Arabidopsis thaliana
gtggggaagtcgtgggc

SEQ ID NO: 180094 - DNA, 17 bp, Arabidopsis thaliana
gtggggcctcaggatct

SEQ ID NO: 180095 - DNA, 17 bp, Arabidopsis thaliana
gtgggggagaccgcgtg

SEQ ID NO: 180096 - DNA, 17 bp, Arabidopsis thaliana
gtgggggtattggcgga

SEQ ID NO: 180097 - DNA, 17 bp, Arabidopsis thaliana
gtggggtaacgaccggt

SEQ ID NO: 180098 - DNA, 17 bp, Arabidopsis thaliana
gtgggtcaggcgaaggc

SEQ ID NO: 180099 - DNA, 17 bp, Arabidopsis thaliana
gtgggtcgcagtgacca

SEQ ID NO: 180100 - DNA, 17 bp, Arabidopsis thaliana
gtgggttagccgatcct

SEQ ID NO: 180101 - DNA, 17 bp, Arabidopsis thaliana
gtgggttagtcgatcct

SEQ ID NO: 180102 - DNA, 17 bp, Arabidopsis thaliana
gtggtaacgggtgacgg

SEQ ID NO: 180103 - DNA, 17 bp, Arabidopsis thaliana
gtggtaactcggtctca

SEQ ID NO: 180104 - DNA, 17 bp, Arabidopsis thaliana
gtggtaactcggtctct

SEQ ID NO: 180105 - DNA, 17 bp, Arabidopsis thaliana
gtggtattggcgagatg

SEQ ID NO: 180106 - DNA, 17 bp, Arabidopsis thaliana
gtggtcgcagtgaccaa

SEQ ID NO: 180107 - DNA, 17 bp, Arabidopsis thaliana
gtggtgatcatataaga

SEQ ID NO: 180108 - DNA, 17 bp, Arabidopsis thaliana
gtggtgatcggatagcc

SEQ ID NO: 180109 - DNA, 17 bp, Arabidopsis thaliana
gtggtgatctttggttc

SEQ ID NO: 180110 - DNA, 17 bp, Arabidopsis thaliana
gtggtgcgacagggtcc

SEQ ID NO: 180111 - DNA, 17 bp, Arabidopsis thaliana
gtggtgggcccataacc

SEQ ID NO: 180112 - DNA, 17 bp, Arabidopsis thaliana
gtggtggtgcatggccg

SEQ ID NO: 180113 - DNA, 17 bp, Arabidopsis thaliana
gtggtgtccggtgcgcc

SEQ ID NO: 180114 - DNA, 17 bp, Arabidopsis thaliana
gtggttaagactagtga

SEQ ID NO: 180115 - DNA, 17 bp, Arabidopsis thaliana
gtggttcgccgcccgcg

SEQ ID NO: 180116 - DNA, 17 bp, Arabidopsis thaliana
gtggttggagtctagct

SEQ ID NO: 180117 - DNA, 17 bp, Arabidopsis thaliana
gtgtaaccaaaacatat

SEQ ID NO: 180118 - DNA, 17 bp, Arabidopsis thaliana
gtgtaagtgactgtatc

SEQ ID NO: 180119 - DNA, 17 bp, Arabidopsis thaliana
gtgtaagtgactgtgtt

SEQ ID NO: 180120 - DNA, 17 bp, Arabidopsis thaliana
gtgtacaaagggcagga

SEQ ID NO: 180121 - DNA, 17 bp, Arabidopsis thaliana
gtgtacaaagggcaggg

SEQ ID NO: 180122 - DNA, 17 bp, Arabidopsis thaliana
gtgtcagaaaagttacc

SEQ ID NO: 180123 - DNA, 17 bp, Arabidopsis thaliana
gtgtcatccttgcgcag

SEQ ID NO: 180124 - DNA, 17 bp, Arabidopsis thaliana
gtgtcccaccgggtgtg

SEQ ID NO: 180125 - DNA, 17 bp, Arabidopsis thaliana
gtgtccgaggaaggaag

SEQ ID NO: 180126 - DNA, 17 bp, Arabidopsis thaliana
gtgtccgaggaaggaga

SEQ ID NO: 180127 - DNA, 17 bp, Arabidopsis thaliana
gtgtcctaagatgagct

SEQ ID NO: 180128 - DNA, 17 bp, Arabidopsis thaliana
gtgtcggactctctgcg

SEQ ID NO: 180129 - DNA, 17 bp, Arabidopsis thaliana
gtgtcgtctttccacta

SEQ ID NO: 180130 - DNA, 17 bp, Arabidopsis thaliana
gtgtcgtctttccactg

SEQ ID NO: 180131 - DNA, 17 bp, Arabidopsis thaliana
gtgtctgtagtccaacg

SEQ ID NO: 180132 - DNA, 17 bp, Arabidopsis thaliana
gtgtgaagaatgggctt

SEQ ID NO: 180133 - DNA, 17 bp, Arabidopsis thaliana
gtgtgaattgcagaatc

SEQ ID NO: 180134 - DNA, 17 bp, Arabidopsis thaliana
gtgtgggtggcaaacaa

SEQ ID NO: 180135 - DNA, 17 bp, Arabidopsis thaliana
gtgtgtacaaagggcag

SEQ ID NO: 180136 - DNA, 17 bp, Arabidopsis thaliana
gtgtgtacgatagccaa

SEQ ID NO: 180137 - DNA, 17 bp, Arabidopsis thaliana
gtgttaaagggagaact

SEQ ID NO: 180138 - DNA, 17 bp, Arabidopsis thaliana
gtgttaatgcgattaac

SEQ ID NO: 180139 - DNA, 17 bp, Arabidopsis thaliana
gtgttatcctatctgag

SEQ ID NO: 180140 - DNA, 17 bp, Arabidopsis thaliana
gtgttcggatcgcggcg

SEQ ID NO: 180141 - DNA, 17 bp, Arabidopsis thaliana
gtgttcggatctcggcg

SEQ ID NO: 180142 - DNA, 17 bp, Arabidopsis thaliana
gtgttctgttcgggtgc

SEQ ID NO: 180143 - DNA, 17 bp, Arabidopsis thaliana
gtgttgccaaccaatcc

SEQ ID NO: 180144 - DNA, 17 bp, Arabidopsis thaliana
gtgttggccttcgggat

SEQ ID NO: 180145 - DNA, 17 bp, Arabidopsis thaliana
gtgttgttctgtagaaa

SEQ ID NO: 180146 - DNA, 17 bp, Arabidopsis thaliana
gtgtttcgactagcgat

SEQ ID NO: 180147 - DNA, 17 bp, Arabidopsis thaliana
gtgttttgtttagacga

SEQ ID NO: 180148 - DNA, 17 bp, Arabidopsis thaliana
gttaaaattccggaacc

SEQ ID NO: 180149 - DNA, 17 bp, Arabidopsis thaliana
gttaacgaacgagacct

SEQ ID NO: 180150 - DNA, 17 bp, Arabidopsis thaliana
gttaattttggggattt

SEQ ID NO: 180151 - DNA, 17 bp, Arabidopsis thaliana
gttacaaaaaatgtagg

SEQ ID NO: 180152 - DNA, 17 bp, Arabidopsis thaliana
gttacaactttttttac

SEQ ID NO: 180153 - DNA, 17 bp, Arabidopsis thaliana
gttacaattttttttac

SEQ ID NO: 180154 - DNA, 17 bp, Arabidopsis thaliana
gttacacttcacagtgc

SEQ ID NO: 180155 - DNA, 17 bp, Arabidopsis thaliana
gttaccacagggataaa

SEQ ID NO: 180156 - DNA, 17 bp, Arabidopsis thaliana
gttaccacagggataac

SEQ ID NO: 180157 - DNA, 17 bp, Arabidopsis thaliana
gttaccacgcagttgcc

SEQ ID NO: 180158 - DNA, 17 bp, Arabidopsis thaliana
gttaccccgcatctcca

SEQ ID NO: 180159 - DNA, 17 bp, Arabidopsis thaliana
gttaccgcacgcggttg

SEQ ID NO: 180160 - DNA, 17 bp, Arabidopsis thaliana
gttactaaaattttgtt

SEQ ID NO: 180161 - DNA, 17 bp, Arabidopsis thaliana
gttactaattcatgatc

SEQ ID NO: 180162 - DNA, 17 bp, Arabidopsis thaliana
gttactggagaacgttt

SEQ ID NO: 180163 - DNA, 17 bp, Arabidopsis thaliana
gttacttatggtgcggt

SEQ ID NO: 180164 - DNA, 17 bp, Arabidopsis thaliana
gttagatatgaggtgct

SEQ ID NO: 180165 - DNA, 17 bp, Arabidopsis thaliana
gttagcaggctgaggtc

SEQ ID NO: 180166 - DNA, 17 bp, Arabidopsis thaliana
gttaggatctctttttg

SEQ ID NO: 180167 - DNA, 17 bp, Arabidopsis thaliana
gttaggcgcgtgctgca

SEQ ID NO: 180168 - DNA, 17 bp, Arabidopsis thaliana
gttagggagtccggaga

SEQ ID NO: 180169 - DNA, 17 bp, Arabidopsis thaliana
gttagggtggcggcggg

SEQ ID NO: 180170 - DNA, 17 bp, Arabidopsis thaliana
gttagtacaccttgaca

SEQ ID NO: 180171 - DNA, 17 bp, Arabidopsis thaliana
gttagtcgcatcctgta

SEQ ID NO: 180172 - DNA, 17 bp, Arabidopsis thaliana
gttatccatttcagtga

SEQ ID NO: 180173 - DNA, 17 bp, Arabidopsis thaliana
gttatccatttcagtgg

SEQ ID NO: 180174 - DNA, 17 bp, Arabidopsis thaliana
gttatcccccgtgtttt

SEQ ID NO: 180175 - DNA, 17 bp, Arabidopsis thaliana
gttatccggcggaccag

SEQ ID NO: 180176 - DNA, 17 bp, Arabidopsis thaliana
gttatcgtccagcggtg

SEQ ID NO: 180177 - DNA, 17 bp, Arabidopsis thaliana
gttatcgtccagcggtt

SEQ ID NO: 180178 - DNA, 17 bp, Arabidopsis thaliana
gttatgacccgaaacag

SEQ ID NO: 180179 - DNA, 17 bp, Arabidopsis thaliana
gttatgaggaatgctga

SEQ ID NO: 180180 - DNA, 17 bp, Arabidopsis thaliana
gttatgcctgccttccc

SEQ ID NO: 180181 - DNA, 17 bp, Arabidopsis thaliana
gttattccattccacct

SEQ ID NO: 180182 - DNA, 17 bp, Arabidopsis thaliana
gttattcctttggcttg

SEQ ID NO: 180183 - DNA, 17 bp, Arabidopsis thaliana
gttattctattccacct

SEQ ID NO: 180184 - DNA, 17 bp, Arabidopsis thaliana
gttattctattccatcc

SEQ ID NO: 180185 - DNA, 17 bp, Arabidopsis thaliana
gttattgtgttttattt

SEQ ID NO: 180186 - DNA, 17 bp, Arabidopsis thaliana
gttatttggatgctgct

SEQ ID NO: 180187 - DNA, 17 bp, Arabidopsis thaliana
gttcaaatccaggatgg

SEQ ID NO: 180188 - DNA, 17 bp, Arabidopsis thaliana
gttcaaatcccacagtt

SEQ ID NO: 180189 - DNA, 17 bp, Arabidopsis thaliana
gttcaaatccgggtgcc

SEQ ID NO: 180190 - DNA, 17 bp, Arabidopsis thaliana
gttcaaatcctacagag

SEQ ID NO: 180191 - DNA, 17 bp, Arabidopsis thaliana
gttcaaatcctacttgg

SEQ ID NO: 180192 - DNA, 17 bp, Arabidopsis thaliana
gttcaaatcctgtctcc

SEQ ID NO: 180193 - DNA, 17 bp, Arabidopsis thaliana
gttcaaatctggttctt

SEQ ID NO: 180194 - DNA, 17 bp, Arabidopsis thaliana
gttcaactaatctgcgg

SEQ ID NO: 180195 - DNA, 17 bp, Arabidopsis thaliana
gttcaagtccctccttc

SEQ ID NO: 180196 - DNA, 17 bp, Arabidopsis thaliana
gttcaagtctcggtgga

SEQ ID NO: 180197 - DNA, 17 bp, Arabidopsis thaliana
gttcaataaagctgtgg

SEQ ID NO: 180198 - DNA, 17 bp, Arabidopsis thaliana
gttcaatcgccgttcgg

SEQ ID NO: 180199 - DNA, 17 bp, Arabidopsis thaliana
gttcaattcccgtcggg

SEQ ID NO: 180200 - DNA, 17 bp, Arabidopsis thaliana
gttcaccatttttcatc

SEQ ID NO: 180201 - DNA, 17 bp, Arabidopsis thaliana
gttcactgaaatggata

SEQ ID NO: 180202 - DNA, 17 bp, Arabidopsis thaliana
gttcagagactcgccgc

SEQ ID NO: 180203 - DNA, 17 bp, Arabidopsis thaliana
gttcagatttactagtc

SEQ ID NO: 180204 - DNA, 17 bp, Arabidopsis thaliana
gttcagattttgtcagc

SEQ ID NO: 180205 - DNA, 17 bp, Arabidopsis thaliana
gttcaggccagcatcgg

SEQ ID NO: 180206 - DNA, 17 bp, Arabidopsis thaliana
gttcagtcataatccag

SEQ ID NO: 180207 - DNA, 17 bp, Arabidopsis thaliana
gttcagttctcgggatg

SEQ ID NO: 180208 - DNA, 17 bp, Arabidopsis thaliana
gttcataccccacttct

SEQ ID NO: 180209 - DNA, 17 bp, Arabidopsis thaliana
gttcatatcccacagtt

SEQ ID NO: 180210 - DNA, 17 bp, Arabidopsis thaliana
gttcatcccactgggtg

SEQ ID NO: 180211 - DNA, 17 bp, Arabidopsis thaliana
gttcatgctgctaactc

SEQ ID NO: 180212 - DNA, 17 bp, Arabidopsis thaliana
gttcatgtctcggtggg

SEQ ID NO: 180213 - DNA, 17 bp, Arabidopsis thaliana
gttcattgacggataaa

SEQ ID NO: 180214 - DNA, 17 bp, Arabidopsis thaliana
gttcatttctcggaacg

SEQ ID NO: 180215 - DNA, 17 bp, Arabidopsis thaliana
gttcatttctcggaatg

SEQ ID NO: 180216 - DNA, 17 bp, Arabidopsis thaliana
gttccaagccatcttgg

SEQ ID NO: 180217 - DNA, 17 bp, Arabidopsis thaliana
gttccaattttatcgga

SEQ ID NO: 180218 - DNA, 17 bp, Arabidopsis thaliana
gttccacgctcaccgca

SEQ ID NO: 180219 - DNA, 17 bp, Arabidopsis thaliana
gttccacgttggctaag

SEQ ID NO: 180220 - DNA, 17 bp, Arabidopsis thaliana
gttccccagtgaagtcg

SEQ ID NO: 180221 - DNA, 17 bp, Arabidopsis thaliana
gttcccgcgggaaaggc

SEQ ID NO: 180222 - DNA, 17 bp, Arabidopsis thaliana
gttccctgtataggcca

SEQ ID NO: 180223 - DNA, 17 bp, Arabidopsis thaliana
gttcccttggctgtggt

SEQ ID NO: 180224 - DNA, 17 bp, Arabidopsis thaliana
gttccggggggagtatg

SEQ ID NO: 180225 - DNA, 17 bp, Arabidopsis thaliana
gttccggtaggctatag

SEQ ID NO: 180226 - DNA, 17 bp, Arabidopsis thaliana
gttcctctgagcacttc

SEQ ID NO: 180227 - DNA, 17 bp, Arabidopsis thaliana
gttcctgccgaagtttc

SEQ ID NO: 180228 - DNA, 17 bp, Arabidopsis thaliana
gttcctgcgtgtgggca

SEQ ID NO: 180229 - DNA, 17 bp, Arabidopsis thaliana
gttcctgggcagcacca

SEQ ID NO: 180230 - DNA, 17 bp, Arabidopsis thaliana
gttccttggctgcaatc

SEQ ID NO: 180231 - DNA, 17 bp, Arabidopsis thaliana
gttcgaaacctgcatgg

SEQ ID NO: 180232 - DNA, 17 bp, Arabidopsis thaliana
gttcgaaccccccagac

SEQ ID NO: 180233 - DNA, 17 bp, Arabidopsis thaliana
gttcgaacccgggcgaa

SEQ ID NO: 180234 - DNA, 17 bp, Arabidopsis thaliana
gttcgaacccgggctca

SEQ ID NO: 180235 - DNA, 17 bp, Arabidopsis thaliana
gttcgaaccctgctgcc

SEQ ID NO: 180236 - DNA, 17 bp, Arabidopsis thaliana
gttcgaactcgggcgaa

SEQ ID NO: 180237 - DNA, 17 bp, Arabidopsis thaliana
gttcgaaggcatgggtc

SEQ ID NO: 180238 - DNA, 17 bp, Arabidopsis thaliana
gttcgaatcccactctt

SEQ ID NO: 180239 - DNA, 17 bp, Arabidopsis thaliana
gttcgaatccctctctt

SEQ ID NO: 180240 - DNA, 17 bp, Arabidopsis thaliana
gttcgaatcctacttgg

SEQ ID NO: 180241 - DNA, 17 bp, Arabidopsis thaliana
gttcgaatcctgccgtt

SEQ ID NO: 180242 - DNA, 17 bp, Arabidopsis thaliana
gttcgaatcctgtcccc

SEQ ID NO: 180243 - DNA, 17 bp, Arabidopsis thaliana
gttcgactcccggcaga

SEQ ID NO: 180244 - DNA, 17 bp, Arabidopsis thaliana
gttcgagccccgtcagt

SEQ ID NO: 180245 - DNA, 17 bp, Arabidopsis thaliana
gttcgagccctactaag

SEQ ID NO: 180246 - DNA, 17 bp, Arabidopsis thaliana
gttcgagcctcggcggg

SEQ ID NO: 180247 - DNA, 17 bp, Arabidopsis thaliana
gttcgagctttcctaaa

SEQ ID NO: 180248 - DNA, 17 bp, Arabidopsis thaliana
gttcgagtcattttctc

SEQ ID NO: 180249 - DNA, 17 bp, Arabidopsis thaliana
gttcgagtcccggcaac

SEQ ID NO: 180250 - DNA, 17 bp, Arabidopsis thaliana
gttcgagtcccgggcaa

SEQ ID NO: 180251 - DNA, 17 bp, Arabidopsis thaliana
gttcgagtccgcttatc

SEQ ID NO: 180252 - DNA, 17 bp, Arabidopsis thaliana
gttcgatccccagtgaa

SEQ ID NO: 180253 - DNA, 17 bp, Arabidopsis thaliana
gttcgatccctgtatag

SEQ ID NO: 180254 - DNA, 17 bp, Arabidopsis thaliana
gttcgatcctgcgtgtg

SEQ ID NO: 180255 - DNA, 17 bp, Arabidopsis thaliana
gttcgatcttacgttag

SEQ ID NO: 180256 - DNA, 17 bp, Arabidopsis thaliana
gttcgattcccggctgg

SEQ ID NO: 180257 - DNA, 17 bp, Arabidopsis thaliana
gttcgattccggagagg

SEQ ID NO: 180258 - DNA, 17 bp, Arabidopsis thaliana
gttcgattccggcaggt

SEQ ID NO: 180259 - DNA, 17 bp, Arabidopsis thaliana
gttcgattccggtgagg

SEQ ID NO: 180260 - DNA, 17 bp, Arabidopsis thaliana
gttcgccccccgcgacg

SEQ ID NO: 180261 - DNA, 17 bp, Arabidopsis thaliana
gttcgccccctacctgg

SEQ ID NO: 180262 - DNA, 17 bp, Arabidopsis thaliana
gttcgccgatatgttga

SEQ ID NO: 180263 - DNA, 17 bp, Arabidopsis thaliana
gttcgccgcccgcgacg

SEQ ID NO: 180264 - DNA, 17 bp, Arabidopsis thaliana
gttcgcctcccggcaga

SEQ ID NO: 180265 - DNA, 17 bp, Arabidopsis thaliana
gttcggaacctgcatgg

SEQ ID NO: 180266 - DNA, 17 bp, Arabidopsis thaliana
gttcggatcgcggcacg

SEQ ID NO: 180267 - DNA, 17 bp, Arabidopsis thaliana
gttcggatcgcggcgac

SEQ ID NO: 180268 - DNA, 17 bp, Arabidopsis thaliana
gttcggctcccggcaga

SEQ ID NO: 180269 - DNA, 17 bp, Arabidopsis thaliana
gttcggctcccggtaga

SEQ ID NO: 180270 - DNA, 17 bp, Arabidopsis thaliana
gttcggctcccggtagg

SEQ ID NO: 180271 - DNA, 17 bp, Arabidopsis thaliana
gttcgggacctgttcgg

SEQ ID NO: 180272 - DNA, 17 bp, Arabidopsis thaliana
gttcgggccccgccggg

SEQ ID NO: 180273 - DNA, 17 bp, Arabidopsis thaliana
gttcgggtcccggcgac

SEQ ID NO: 180274 - DNA, 17 bp, Arabidopsis thaliana
gttcggtccacgctcac

SEQ ID NO: 180275 - DNA, 17 bp, Arabidopsis thaliana
gttcggtccctgtatag

SEQ ID NO: 180276 - DNA, 17 bp, Arabidopsis thaliana
gttcggtcctgggcagc

SEQ ID NO: 180277 - DNA, 17 bp, Arabidopsis thaliana
gttcggttccggcaggt

SEQ ID NO: 180278 - DNA, 17 bp, Arabidopsis thaliana
gttcgtaacctgcatgg

SEQ ID NO: 180279 - DNA, 17 bp, Arabidopsis thaliana
gttcgtacccgggcgaa

SEQ ID NO: 180280 - DNA, 17 bp, Arabidopsis thaliana
gttcgtacccgggctca

SEQ ID NO: 180281 - DNA, 17 bp, Arabidopsis thaliana
gttcgtatccggtaggg

SEQ ID NO: 180282 - DNA, 17 bp, Arabidopsis thaliana
gttcgtatctctcaggc

SEQ ID NO: 180283 - DNA, 17 bp, Arabidopsis thaliana
gttcgtcccggcaacgg

SEQ ID NO: 180284 - DNA, 17 bp, Arabidopsis thaliana
gttcgtcctctggtgct

SEQ ID NO: 180285 - DNA, 17 bp, Arabidopsis thaliana
gttcgtcgatatgttga

SEQ ID NO: 180286 - DNA, 17 bp, Arabidopsis thaliana
gttcgtcgatatgttgg

SEQ ID NO: 180287 - DNA, 17 bp, Arabidopsis thaliana
gttcgtctcccggcaga

SEQ ID NO: 180288 - DNA, 17 bp, Arabidopsis thaliana
gttcgtctgacttgggt

SEQ ID NO: 180289 - DNA, 17 bp, Arabidopsis thaliana
gttcgtgtcccacccac

SEQ ID NO: 180290 - DNA, 17 bp, Arabidopsis thaliana
gttcgtgtcccaccggg

SEQ ID NO: 180291 - DNA, 17 bp, Arabidopsis thaliana
gttcgtgtcccactggg

SEQ ID NO: 180292 - DNA, 17 bp, Arabidopsis thaliana
gttcgtgtcccggcgac

SEQ ID NO: 180293 - DNA, 17 bp, Arabidopsis thaliana
gttcgttccacgctcac

SEQ ID NO: 180294 - DNA, 17 bp, Arabidopsis thaliana
gttcgttccccggcaac

SEQ ID NO: 180295 - DNA, 17 bp, Arabidopsis thaliana
gttcgttccccggctgg

SEQ ID NO: 180296 - DNA, 17 bp, Arabidopsis thaliana
gttcgttcccctgctgc

SEQ ID NO: 180297 - DNA, 17 bp, Arabidopsis thaliana
gttcgttccctgtatag

SEQ ID NO: 180298 - DNA, 17 bp, Arabidopsis thaliana
gttcgttcctcgccggg

SEQ ID NO: 180299 - DNA, 17 bp, Arabidopsis thaliana
gttcgttcctgggtgcg

SEQ ID NO: 180300 - DNA, 17 bp, Arabidopsis thaliana
gttcgtttccagcaggt

SEQ ID NO: 180301 - DNA, 17 bp, Arabidopsis thaliana
gttcgtttcccggctgg

SEQ ID NO: 180302 - DNA, 17 bp, Arabidopsis thaliana
gttcgtttccgacaggt

SEQ ID NO: 180303 - DNA, 17 bp, Arabidopsis thaliana
gttcgtttccggcaggc

SEQ ID NO: 180304 - DNA, 17 bp, Arabidopsis thaliana
gttcgtttccggcaggt

SEQ ID NO: 180305 - DNA, 17 bp, Arabidopsis thaliana
gttcgtttctcggaacg

SEQ ID NO: 180306 - DNA, 17 bp, Arabidopsis thaliana
gttcgtttttccggcag

SEQ ID NO: 180307 - DNA, 17 bp, Arabidopsis thaliana
gttctcaggccatatca

SEQ ID NO: 180308 - DNA, 17 bp, Arabidopsis thaliana
gttctccatcccattta

SEQ ID NO: 180309 - DNA, 17 bp, Arabidopsis thaliana
gttctccggattcgcgt

SEQ ID NO: 180310 - DNA, 17 bp, Arabidopsis thaliana
gttctctggattcgcgt

SEQ ID NO: 180311 - DNA, 17 bp, Arabidopsis thaliana
gttctgaagagcatcgg

SEQ ID NO: 180312 - DNA, 17 bp, Arabidopsis thaliana
gttctgattggtcgtct

SEQ ID NO: 180313 - DNA, 17 bp, Arabidopsis thaliana
gttctgcctattaactc

SEQ ID NO: 180314 - DNA, 17 bp, Arabidopsis thaliana
gttctgtgatgaagtct

SEQ ID NO: 180315 - DNA, 17 bp, Arabidopsis thaliana
gttcttagttggtggag

SEQ ID NO: 180316 - DNA, 17 bp, Arabidopsis thaliana
gttcttcatcgatgcga

SEQ ID NO: 180317 - DNA, 17 bp, Arabidopsis thaliana
gttcttccggcaggtcg

SEQ ID NO: 180318 - DNA, 17 bp, Arabidopsis thaliana
gttcttcggaatgactg

SEQ ID NO: 180319 - DNA, 17 bp, Arabidopsis thaliana
gttctttagacgacttg

SEQ ID NO: 180320 - DNA, 17 bp, Arabidopsis thaliana
gttctttgtctgttacc

SEQ ID NO: 180321 - DNA, 17 bp, Arabidopsis thaliana
gttcttttggtacgatg

SEQ ID NO: 180322 - DNA, 17 bp, Arabidopsis thaliana
gttgaaaagccagtggc

SEQ ID NO: 180323 - DNA, 17 bp, Arabidopsis thaliana
gttgaaccctgggatgg

SEQ ID NO: 180324 - DNA, 17 bp, Arabidopsis thaliana
gttgaaccttgggaggg

SEQ ID NO: 180325 - DNA, 17 bp, Arabidopsis thaliana
gttgaaccttgggatgg

SEQ ID NO: 180326 - DNA, 17 bp, Arabidopsis thaliana
gttgaaccttgggattg

SEQ ID NO: 180327 - DNA, 17 bp, Arabidopsis thaliana
gttgacaactaatgttt

SEQ ID NO: 180328 - DNA, 17 bp, Arabidopsis thaliana
gttgaccccgtccaggt

SEQ ID NO: 180329 - DNA, 17 bp, Arabidopsis thaliana
gttgacctcggatcagg

SEQ ID NO: 180330 - DNA, 17 bp, Arabidopsis thaliana
gttgacggcaacgttag

SEQ ID NO: 180331 - DNA, 17 bp, Arabidopsis thaliana
gttgactacgtccctgc

SEQ ID NO: 180332 - DNA, 17 bp, Arabidopsis thaliana
gttgagccaagaccgtg

SEQ ID NO: 180333 - DNA, 17 bp, Arabidopsis thaliana
gttgatatggccgagta

SEQ ID NO: 180334 - DNA, 17 bp, Arabidopsis thaliana
gttgatatggccgagtt

SEQ ID NO: 180335 - DNA, 17 bp, Arabidopsis thaliana
gttgatcttgttagttt

SEQ ID NO: 180336 - DNA, 17 bp, Arabidopsis thaliana
gttgattcgcacaattg

SEQ ID NO: 180337 - DNA, 17 bp, Arabidopsis thaliana
gttgcaaagcaatgtgt

SEQ ID NO: 180338 - DNA, 17 bp, Arabidopsis thaliana
gttgcacccgagaatcc

SEQ ID NO: 180339 - DNA, 17 bp, Arabidopsis thaliana
gttgcactactgcacgg

SEQ ID NO: 180340 - DNA, 17 bp, Arabidopsis thaliana
gttgcatctaccacatt

SEQ ID NO: 180341 - DNA, 17 bp, Arabidopsis thaliana
gttgccaacagagacac

SEQ ID NO: 180342 - DNA, 17 bp, Arabidopsis thaliana
gttgccatcgatgggcc

SEQ ID NO: 180343 - DNA, 17 bp, Arabidopsis thaliana
gttgcccattggataag

SEQ ID NO: 180344 - DNA, 17 bp, Arabidopsis thaliana
gttgccggggaccgaac

SEQ ID NO: 180345 - DNA, 17 bp, Arabidopsis thaliana
gttgccgtagcggaggg

SEQ ID NO: 180346 - DNA, 17 bp, Arabidopsis thaliana
gttgcggagcagggttt

SEQ ID NO: 180347 - DNA, 17 bp, Arabidopsis thaliana
gttgctaatacagttac

SEQ ID NO: 180348 - DNA, 17 bp, Arabidopsis thaliana
gttgctctgatgattca

SEQ ID NO: 180349 - DNA, 17 bp, Arabidopsis thaliana
gttgcttataggactcc

SEQ ID NO: 180350 - DNA, 17 bp, Arabidopsis thaliana
gttggagacgccgacga

SEQ ID NO: 180351 - DNA, 17 bp, Arabidopsis thaliana
gttggatacttttcaaa

SEQ ID NO: 180352 - DNA, 17 bp, Arabidopsis thaliana
gttggatatttttcaaa

SEQ ID NO: 180353 - DNA, 17 bp, Arabidopsis thaliana
gttggatgatcgaactt

SEQ ID NO: 180354 - DNA, 17 bp, Arabidopsis thaliana
gttggctaagtccgttc

SEQ ID NO: 180355 - DNA, 17 bp, Arabidopsis thaliana
gttggctatagctcggt

SEQ ID NO: 180356 - DNA, 17 bp, Arabidopsis thaliana
gttgggcaactgcgtgg

SEQ ID NO: 180357 - DNA, 17 bp, Arabidopsis thaliana
gttggggaagaatcgcg

SEQ ID NO: 180358 - DNA, 17 bp, Arabidopsis thaliana
gttggggaagtatcgcg

SEQ ID NO: 180359 - DNA, 17 bp, Arabidopsis thaliana
gttggtcacaacaatat

SEQ ID NO: 180360 - DNA, 17 bp, Arabidopsis thaliana
gttggtcgattaagaca

SEQ ID NO: 180361 - DNA, 17 bp, Arabidopsis thaliana
gttggtggagcgatttg

SEQ ID NO: 180362 - DNA, 17 bp, Arabidopsis thaliana
gttgtaaaattcatccg

SEQ ID NO: 180363 - DNA, 17 bp, Arabidopsis thaliana
gttgtaactcttgttga

SEQ ID NO: 180364 - DNA, 17 bp, Arabidopsis thaliana
gttgtccgtccactgct

SEQ ID NO: 180365 - DNA, 17 bp, Arabidopsis thaliana
gttgtcgtccagcggtt

SEQ ID NO: 180366 - DNA, 17 bp, Arabidopsis thaliana
gttgtgaccaacattta

SEQ ID NO: 180367 - DNA, 17 bp, Arabidopsis thaliana
gttgtgcgatatgttgc

SEQ ID NO: 180368 - DNA, 17 bp, Arabidopsis thaliana
gttgtggccgtggggac

SEQ ID NO: 180369 - DNA, 17 bp, Arabidopsis thaliana
gttgtgtactggtttag

SEQ ID NO: 180370 - DNA, 17 bp, Arabidopsis thaliana
gttgtgtcccggcggcg

SEQ ID NO: 180371 - DNA, 17 bp, Arabidopsis thaliana
gttgtttaccgtaatgc

SEQ ID NO: 180372 - DNA, 17 bp, Arabidopsis thaliana
gtttaatttgactaaat

SEQ ID NO: 180373 - DNA, 17 bp, Arabidopsis thaliana
gtttaccagtttgttct

SEQ ID NO: 180374 - DNA, 17 bp, Arabidopsis thaliana
gtttagaccgtcgtgag

SEQ ID NO: 180375 - DNA, 17 bp, Arabidopsis thaliana
gtttagatacactctga

SEQ ID NO: 180376 - DNA, 17 bp, Arabidopsis thaliana
gtttaggccaaggaagt

SEQ ID NO: 180377 - DNA, 17 bp, Arabidopsis thaliana
gtttagtcgcatcctgt

SEQ ID NO: 180378 - DNA, 17 bp, Arabidopsis thaliana
gtttagtcgctcctgta

SEQ ID NO: 180379 - DNA, 17 bp, Arabidopsis thaliana
gtttatcactttgttta

SEQ ID NO: 180380 - DNA, 17 bp, Arabidopsis thaliana
gtttatttttttttgac

SEQ ID NO: 180381 - DNA, 17 bp, Arabidopsis thaliana
gtttcaaacacttggta

SEQ ID NO: 180382 - DNA, 17 bp, Arabidopsis thaliana
gtttcaaatcccctagg

SEQ ID NO: 180383 - DNA, 17 bp, Arabidopsis thaliana
gtttcaccgccaccacc

SEQ ID NO: 180384 - DNA, 17 bp, Arabidopsis thaliana
gtttccacaggtcgtaa

SEQ ID NO: 180385 - DNA, 17 bp, Arabidopsis thaliana
gtttccagggtgggcag

SEQ ID NO: 180386 - DNA, 17 bp, Arabidopsis thaliana
gtttcccggctggtgca

SEQ ID NO: 180387 - DNA, 17 bp, Arabidopsis thaliana
gtttccggcaggtcgga

SEQ ID NO: 180388 - DNA, 17 bp, Arabidopsis thaliana
gtttccgtaggtgaacc

SEQ ID NO: 180389 - DNA, 17 bp, Arabidopsis thaliana
gtttcgggtcataacgg

SEQ ID NO: 180390 - DNA, 17 bp, Arabidopsis thaliana
gtttcgtggtgtagatg

SEQ ID NO: 180391 - DNA, 17 bp, Arabidopsis thaliana
gtttctaggaccgccgt

SEQ ID NO: 180392 - DNA, 17 bp, Arabidopsis thaliana
gtttctcaaacgaagta

SEQ ID NO: 180393 - DNA, 17 bp, Arabidopsis thaliana
gtttctcaaacgaagtg

SEQ ID NO: 180394 - DNA, 17 bp, Arabidopsis thaliana
gtttctcccggcagacg

SEQ ID NO: 180395 - DNA, 17 bp, Arabidopsis thaliana
gtttctcggaacgcccc

SEQ ID NO: 180396 - DNA, 17 bp, Arabidopsis thaliana
gtttctcggaatgcccc

SEQ ID NO: 180397 - DNA, 17 bp, Arabidopsis thaliana
gtttctcgtggcgtgcc

SEQ ID NO: 180398 - DNA, 17 bp, Arabidopsis thaliana
gtttctctacaaacttt

SEQ ID NO: 180399 - DNA, 17 bp, Arabidopsis thaliana
gtttcttagccgattcc

SEQ ID NO: 180400 - DNA, 17 bp, Arabidopsis thaliana
gtttctttgggtgtaaa

SEQ ID NO: 180401 - DNA, 17 bp, Arabidopsis thaliana
gtttctttgggtgtata

SEQ ID NO: 180402 - DNA, 17 bp, Arabidopsis thaliana
gtttctttgggtgtttg

SEQ ID NO: 180403 - DNA, 17 bp, Arabidopsis thaliana
gtttgaaaactatttgg

SEQ ID NO: 180404 - DNA, 17 bp, Arabidopsis thaliana
gtttgaaaacttaccta

SEQ ID NO: 180405 - DNA, 17 bp, Arabidopsis thaliana
gtttgacgcagaagaga

SEQ ID NO: 180406 - DNA, 17 bp, Arabidopsis thaliana
gtttgaggcaataacaa

SEQ ID NO: 180407 - DNA, 17 bp, Arabidopsis thaliana
gtttgatggtaactact

SEQ ID NO: 180408 - DNA, 17 bp, Arabidopsis thaliana
gtttgcaaatggagagc

SEQ ID NO: 180409 - DNA, 17 bp, Arabidopsis thaliana
gtttgcagcagaaaatt

SEQ ID NO: 180410 - DNA, 17 bp, Arabidopsis thaliana
gtttgcaggaaagatcc

SEQ ID NO: 180411 - DNA, 17 bp, Arabidopsis thaliana
gtttgctttttgcgaaa

SEQ ID NO: 180412 - DNA, 17 bp, Arabidopsis thaliana
gtttggctggggcggca

SEQ ID NO: 180413 - DNA, 17 bp, Arabidopsis thaliana
gtttgtaaattgtaaga

SEQ ID NO: 180414 - DNA, 17 bp, Arabidopsis thaliana
gtttgttcgcagcagag

SEQ ID NO: 180415 - DNA, 17 bp, Arabidopsis thaliana
gtttgttgtactcggtc

SEQ ID NO: 180416 - DNA, 17 bp, Arabidopsis thaliana
gtttgtttcccggctgg

SEQ ID NO: 180417 - DNA, 17 bp, Arabidopsis thaliana
gttttaccctactgatg

SEQ ID NO: 180418 - DNA, 17 bp, Arabidopsis thaliana
gttttagcacatcccaa

SEQ ID NO: 180419 - DNA, 17 bp, Arabidopsis thaliana
gttttccaagcaagact

SEQ ID NO: 180420 - DNA, 17 bp, Arabidopsis thaliana
gttttccaggtaatcgg

SEQ ID NO: 180421 - DNA, 17 bp, Arabidopsis thaliana
gttttccttgactcgct

SEQ ID NO: 180422 - DNA, 17 bp, Arabidopsis thaliana
gttttctctaaaattat

SEQ ID NO: 180423 - DNA, 17 bp, Arabidopsis thaliana
gttttctgcgggaagca

SEQ ID NO: 180424 - DNA, 17 bp, Arabidopsis thaliana
gttttcttcgtcggaga

SEQ ID NO: 180425 - DNA, 17 bp, Arabidopsis thaliana
gttttcttttgcatatc

SEQ ID NO: 180426 - DNA, 17 bp, Arabidopsis thaliana
gttttcttttgcatttc

SEQ ID NO: 180427 - DNA, 17 bp, Arabidopsis thaliana
gttttgaaaagtatcca

SEQ ID NO: 180428 - DNA, 17 bp, Arabidopsis thaliana
gttttgatgatcattaa

SEQ ID NO: 180429 - DNA, 17 bp, Arabidopsis thaliana
gttttgcagcgaccgcc

SEQ ID NO: 180430 - DNA, 17 bp, Arabidopsis thaliana
gttttggacaggtatcg

SEQ ID NO: 180431 - DNA, 17 bp, Arabidopsis thaliana
gttttggacaggtgtcg

SEQ ID NO: 180432 - DNA, 17 bp, Arabidopsis thaliana
gttttgggatcatacat

SEQ ID NO: 180433 - DNA, 17 bp, Arabidopsis thaliana
gttttgggatcatactg

SEQ ID NO: 180434 - DNA, 17 bp, Arabidopsis thaliana
gttttgggcaggtatcg

SEQ ID NO: 180435 - DNA, 17 bp, Arabidopsis thaliana
gttttgggtacagaggg

SEQ ID NO: 180436 - DNA, 17 bp, Arabidopsis thaliana
gttttgtcacaggcctt

SEQ ID NO: 180437 - DNA, 17 bp, Arabidopsis thaliana
gttttgttgttggggac

SEQ ID NO: 180438 - DNA, 17 bp, Arabidopsis thaliana
gtttttccaggttgcat

SEQ ID NO: 180439 - DNA, 17 bp, Arabidopsis thaliana
gtttttgacccaggtga

SEQ ID NO: 180440 - DNA, 17 bp, Arabidopsis thaliana
gtttttggaattttcgt

SEQ ID NO: 180441 - DNA, 17 bp, Arabidopsis thaliana
gtttttggtcccaaggc

SEQ ID NO: 180442 - DNA, 17 bp, Arabidopsis thaliana
gttttttattttgtctc

SEQ ID NO: 180443 - DNA, 17 bp, Arabidopsis thaliana
taaaaaagattgagccg

SEQ ID NO: 180444 - DNA, 17 bp, Arabidopsis thaliana
taaaaaggaaaatgatt

SEQ ID NO: 180445 - DNA, 17 bp, Arabidopsis thaliana
taaaaattcaaataatt

SEQ ID NO: 180446 - DNA, 17 bp, Arabidopsis thaliana
taaaacactctccaagg

SEQ ID NO: 180447 - DNA, 17 bp, Arabidopsis thaliana
taaaacgactctcggca

SEQ ID NO: 180448 - DNA, 17 bp, Arabidopsis thaliana
taaaactgcctgaggaa

SEQ ID NO: 180449 - DNA, 17 bp, Arabidopsis thaliana
taaaagaccaatctgta

SEQ ID NO: 180450 - DNA, 17 bp, Arabidopsis thaliana
taaaagatctggtgatg

SEQ ID NO: 180451 - DNA, 17 bp, Arabidopsis thaliana
taaaagcccctgtatta

SEQ ID NO: 180452 - DNA, 17 bp, Arabidopsis thaliana
taaaagcccctgtattt

SEQ ID NO: 180453 - DNA, 17 bp, Arabidopsis thaliana
taaaaggtcgacgcacg

SEQ ID NO: 180454 - DNA, 17 bp, Arabidopsis thaliana
taaaaggtcgacgcggg

SEQ ID NO: 180455 - DNA, 17 bp, Arabidopsis thaliana
taaaagttaactccaat

SEQ ID NO: 180456 - DNA, 17 bp, Arabidopsis thaliana
taaaatagaaatggcga

SEQ ID NO: 180457 - DNA, 17 bp, Arabidopsis thaliana
taaaatcggatgttttc

SEQ ID NO: 180458 - DNA, 17 bp, Arabidopsis thaliana
taaaatcttttttacca

SEQ ID NO: 180459 - DNA, 17 bp, Arabidopsis thaliana
taaaatgaacaagcgga

SEQ ID NO: 180460 - DNA, 17 bp, Arabidopsis thaliana
taaaatgcgacatttgt

SEQ ID NO: 180461 - DNA, 17 bp, Arabidopsis thaliana
taaaatgctctgcacgg

SEQ ID NO: 180462 - DNA, 17 bp, Arabidopsis thaliana
taaaattcatccgcttg

SEQ ID NO: 180463 - DNA, 17 bp, Arabidopsis thaliana
taaacaaagtgataaac

SEQ ID NO: 180464 - DNA, 17 bp, Arabidopsis thaliana
taaacacatcgtgggcc

SEQ ID NO: 180465 - DNA, 17 bp, Arabidopsis thaliana
taaaccgaccgagccag

SEQ ID NO: 180466 - DNA, 17 bp, Arabidopsis thaliana
taaacggcgggagtaac

SEQ ID NO: 180467 - DNA, 17 bp, Arabidopsis thaliana
taaactcaaaatccgtc

SEQ ID NO: 180468 - DNA, 17 bp, Arabidopsis thaliana
taaactcgtggatatct

SEQ ID NO: 180469 - DNA, 17 bp, Arabidopsis thaliana
taaactgttagggtcta

SEQ ID NO: 180470 - DNA, 17 bp, Arabidopsis thaliana
taaagaacgtgagagat

SEQ ID NO: 180471 - DNA, 17 bp, Arabidopsis thaliana
taaagaagatgacagcg

SEQ ID NO: 180472 - DNA, 17 bp, Arabidopsis thaliana
taaagaggaagatagga

SEQ ID NO: 180473 - DNA, 17 bp, Arabidopsis thaliana
taaagccagaggaaact

SEQ ID NO: 180474 - DNA, 17 bp, Arabidopsis thaliana
taaagccgtgttatcct

SEQ ID NO: 180475 - DNA, 17 bp, Arabidopsis thaliana
taaagccgtgttttctt

SEQ ID NO: 180476 - DNA, 17 bp, Arabidopsis thaliana
taaagcgtctgtaggtg

SEQ ID NO: 180477 - DNA, 17 bp, Arabidopsis thaliana
taaagctgccagcatga

SEQ ID NO: 180478 - DNA, 17 bp, Arabidopsis thaliana
taaagtaagatgattta

SEQ ID NO: 180479 - DNA, 17 bp, Arabidopsis thaliana
taaagtaagatgatttc

SEQ ID NO: 180480 - DNA, 17 bp, Arabidopsis thaliana
taaagtgttctattgtg

SEQ ID NO: 180481 - DNA, 17 bp, Arabidopsis thaliana
taaatacatatcttaag

SEQ ID NO: 180482 - DNA, 17 bp, Arabidopsis thaliana
taaatacgggcgagaga

SEQ ID NO: 180483 - DNA, 17 bp, Arabidopsis thaliana
taaatacgggcgaggga

SEQ ID NO: 180484 - DNA, 17 bp, Arabidopsis thaliana
taaataggtaggacgtg

SEQ ID NO: 180485 - DNA, 17 bp, Arabidopsis thaliana
taaatcccttaacgagg

SEQ ID NO: 180486 - DNA, 17 bp, Arabidopsis thaliana
taaatccgagccaagga

SEQ ID NO: 180487 - DNA, 17 bp, Arabidopsis thaliana
taaatcgatcaagattt

SEQ ID NO: 180488 - DNA, 17 bp, Arabidopsis thaliana
taaatcttgatgatgct

SEQ ID NO: 180489 - DNA, 17 bp, Arabidopsis thaliana
taaatgagattttcaag

SEQ ID NO: 180490 - DNA, 17 bp, Arabidopsis thaliana
taaatgcgtctgatacg

SEQ ID NO: 180491 - DNA, 17 bp, Arabidopsis thaliana
taaatgggatggagaac

SEQ ID NO: 180492 - DNA, 17 bp, Arabidopsis thaliana
taaattccgtccaagga

SEQ ID NO: 180493 - DNA, 17 bp, Arabidopsis thaliana
taaattccgtccaaggc

SEQ ID NO: 180494 - DNA, 17 bp, Arabidopsis thaliana
taaattctgctggtgct

SEQ ID NO: 180495 - DNA, 17 bp, Arabidopsis thaliana
taacaaagtataccttg

SEQ ID NO: 180496 - DNA, 17 bp, Arabidopsis thaliana
taacaacgctaacaccg

SEQ ID NO: 180497 - DNA, 17 bp, Arabidopsis thaliana
taacacagctcgggcct

SEQ ID NO: 180498 - DNA, 17 bp, Arabidopsis thaliana
taacactcagtgaccaa

SEQ ID NO: 180499 - DNA, 17 bp, Arabidopsis thaliana
taacactcagtgaccac

SEQ ID NO: 180500 - DNA, 17 bp, Arabidopsis thaliana
taacagatgtgccgcca

SEQ ID NO: 180501 - DNA, 17 bp, Arabidopsis thaliana
taacagatgtgccgccc

SEQ ID NO: 180502 - DNA, 17 bp, Arabidopsis thaliana
taacagattcgatcata

SEQ ID NO: 180503 - DNA, 17 bp, Arabidopsis thaliana
taacagcctgcccaccc

SEQ ID NO: 180504 - DNA, 17 bp, Arabidopsis thaliana
taacaggtccgggatgc

SEQ ID NO: 180505 - DNA, 17 bp, Arabidopsis thaliana
taacaggtccgtgatgc

SEQ ID NO: 180506 - DNA, 17 bp, Arabidopsis thaliana
taacaggtctgtgatgc

SEQ ID NO: 180507 - DNA, 17 bp, Arabidopsis thaliana
taacagttctcactcac

SEQ ID NO: 180508 - DNA, 17 bp, Arabidopsis thaliana
taacagttctcactcat

SEQ ID NO: 180509 - DNA, 17 bp, Arabidopsis thaliana
taacataccgggctctt

SEQ ID NO: 180510 - DNA, 17 bp, Arabidopsis thaliana
taacatactggtaaatg

SEQ ID NO: 180511 - DNA, 17 bp, Arabidopsis thaliana
taacatagcgtttgatt

SEQ ID NO: 180512 - DNA, 17 bp, Arabidopsis thaliana
taacatcataggattta

SEQ ID NO: 180513 - DNA, 17 bp, Arabidopsis thaliana
taacatcataggatttc

SEQ ID NO: 180514 - DNA, 17 bp, Arabidopsis thaliana
taaccaaggatgactta

SEQ ID NO: 180515 - DNA, 17 bp, Arabidopsis thaliana
taaccaaggatgacttg

SEQ ID NO: 180516 - DNA, 17 bp, Arabidopsis thaliana
taaccattcaccatata

SEQ ID NO: 180517 - DNA, 17 bp, Arabidopsis thaliana
taaccccaaaaccatta

SEQ ID NO: 180518 - DNA, 17 bp, Arabidopsis thaliana
taacctagtcgcctaag

SEQ ID NO: 180519 - DNA, 17 bp, Arabidopsis thaliana
taacctcttctacttgg

SEQ ID NO: 180520 - DNA, 17 bp, Arabidopsis thaliana
taacctggctctgatac

SEQ ID NO: 180521 - DNA, 17 bp, Arabidopsis thaliana
taacctgggtgatctat

SEQ ID NO: 180522 - DNA, 17 bp, Arabidopsis thaliana
taaccttaaaactgata

SEQ ID NO: 180523 - DNA, 17 bp, Arabidopsis thaliana
taaccttaacaaaccta

SEQ ID NO: 180524 - DNA, 17 bp, Arabidopsis thaliana
taaccttctccggtttg

SEQ ID NO: 180525 - DNA, 17 bp, Arabidopsis thaliana
taaccttgtgtcaggac

SEQ ID NO: 180526 - DNA, 17 bp, Arabidopsis thaliana
taacgaacgagacctca

SEQ ID NO: 180527 - DNA, 17 bp, Arabidopsis thaliana
taacgagcacataccaa

SEQ ID NO: 180528 - DNA, 17 bp, Arabidopsis thaliana
taacgaggatccatcca

SEQ ID NO: 180529 - DNA, 17 bp, Arabidopsis thaliana
taacgaggatccattgg

SEQ ID NO: 180530 - DNA, 17 bp, Arabidopsis thaliana
taacgcaatgtgatttc

SEQ ID NO: 180531 - DNA, 17 bp, Arabidopsis thaliana
taacgcacaacactaag

SEQ ID NO: 180532 - DNA, 17 bp, Arabidopsis thaliana
taacgctaaagatttgt

SEQ ID NO: 180533 - DNA, 17 bp, Arabidopsis thaliana
taacggagggttagggc

SEQ ID NO: 180534 - DNA, 17 bp, Arabidopsis thaliana
taacggcgagtgaagca

SEQ ID NO: 180535 - DNA, 17 bp, Arabidopsis thaliana
taacggcgtgcctcggc

SEQ ID NO: 180536 - DNA, 17 bp, Arabidopsis thaliana
taacgggcttgggcggc

SEQ ID NO: 180537 - DNA, 17 bp, Arabidopsis thaliana
taacgggtgacgtagaa

SEQ ID NO: 180538 - DNA, 17 bp, Arabidopsis thaliana
taacggtcttttacggt

SEQ ID NO: 180539 - DNA, 17 bp, Arabidopsis thaliana
taacgtaagggtgctta

SEQ ID NO: 180540 - DNA, 17 bp, Arabidopsis thaliana
taacgttgtttaccgta

SEQ ID NO: 180541 - DNA, 17 bp, Arabidopsis thaliana
taactactttcagacaa

SEQ ID NO: 180542 - DNA, 17 bp, Arabidopsis thaliana
taactagatgaatgtgg

SEQ ID NO: 180543 - DNA, 17 bp, Arabidopsis thaliana
taactagctacgtggag

SEQ ID NO: 180544 - DNA, 17 bp, Arabidopsis thaliana
taactattttgagaaga

SEQ ID NO: 180545 - DNA, 17 bp, Arabidopsis thaliana
taactattttgggaaga

SEQ ID NO: 180546 - DNA, 17 bp, Arabidopsis thaliana
taactcctttgttttcc

SEQ ID NO: 180547 - DNA, 17 bp, Arabidopsis thaliana
taactcgacggatcgca

SEQ ID NO: 180548 - DNA, 17 bp, Arabidopsis thaliana
taactcggtctcaggca

SEQ ID NO: 180549 - DNA, 17 bp, Arabidopsis thaliana
taactgggctcgaattg

SEQ ID NO: 180550 - DNA, 17 bp, Arabidopsis thaliana
taactggtttaagcata

SEQ ID NO: 180551 - DNA, 17 bp, Arabidopsis thaliana
taactgtgaatatggtt

SEQ ID NO: 180552 - DNA, 17 bp, Arabidopsis thaliana
taactgttggaaggtct

SEQ ID NO: 180553 - DNA, 17 bp, Arabidopsis thaliana
taacttcgggaaaagga

SEQ ID NO: 180554 - DNA, 17 bp, Arabidopsis thaliana
taagaaaaaaatccact

SEQ ID NO: 180555 - DNA, 17 bp, Arabidopsis thaliana
taagaaccgccggcgat

SEQ ID NO: 180556 - DNA, 17 bp, Arabidopsis thaliana
taagaagataggttagc

SEQ ID NO: 180557 - DNA, 17 bp, Arabidopsis thaliana
taagaagctatctggcc

SEQ ID NO: 180558 - DNA, 17 bp, Arabidopsis thaliana
taagacagcaggacggt

SEQ ID NO: 180559 - DNA, 17 bp, Arabidopsis thaliana
taagactcgatggttga

SEQ ID NO: 180560 - DNA, 17 bp, Arabidopsis thaliana
taagactttgactcagt

SEQ ID NO: 180561 - DNA, 17 bp, Arabidopsis thaliana
taagagaaaagttctac

SEQ ID NO: 180562 - DNA, 17 bp, Arabidopsis thaliana
taagagcagtttccttg

SEQ ID NO: 180563 - DNA, 17 bp, Arabidopsis thaliana
taagaggcagagtggcc

SEQ ID NO: 180564 - DNA, 17 bp, Arabidopsis thaliana
taagagtaccggggaag

SEQ ID NO: 180565 - DNA, 17 bp, Arabidopsis thaliana
taagatcgtcaagcgac

SEQ ID NO: 180566 - DNA, 17 bp, Arabidopsis thaliana
taagatggatcttgata

SEQ ID NO: 180567 - DNA, 17 bp, Arabidopsis thaliana
taagatggtgggacaca

SEQ ID NO: 180568 - DNA, 17 bp, Arabidopsis thaliana
taagatggtgggacact

SEQ ID NO: 180569 - DNA, 17 bp, Arabidopsis thaliana
taagattaccacatcaa

SEQ ID NO: 180570 - DNA, 17 bp, Arabidopsis thaliana
taagatttttcgtgatt

SEQ ID NO: 180571 - DNA, 17 bp, Arabidopsis thaliana
taagcagatgcttgagt

SEQ ID NO: 180572 - DNA, 17 bp, Arabidopsis thaliana
taagcagatttctcacc

SEQ ID NO: 180573 - DNA, 17 bp, Arabidopsis thaliana
taagcagtgtagcggtc

SEQ ID NO: 180574 - DNA, 17 bp, Arabidopsis thaliana
taagcatccattgtttc

SEQ ID NO: 180575 - DNA, 17 bp, Arabidopsis thaliana
taagcatgacttagact

SEQ ID NO: 180576 - DNA, 17 bp, Arabidopsis thaliana
taagccaaggatgactt

SEQ ID NO: 180577 - DNA, 17 bp, Arabidopsis thaliana
taagccgcaggctccac

SEQ ID NO: 180578 - DNA, 17 bp, Arabidopsis thaliana
taagcgaaggcttggct

SEQ ID NO: 180579 - DNA, 17 bp, Arabidopsis thaliana
taagcgagggcttggct

SEQ ID NO: 180580 - DNA, 17 bp, Arabidopsis thaliana
taagcgcgagtcatcag

SEQ ID NO: 180581 - DNA, 17 bp, Arabidopsis thaliana
taagcgtgcttgggcga

SEQ ID NO: 180582 - DNA, 17 bp, Arabidopsis thaliana
taagctcaggagggata

SEQ ID NO: 180583 - DNA, 17 bp, Arabidopsis thaliana
taagctccggtcatatc

SEQ ID NO: 180584 - DNA, 17 bp, Arabidopsis thaliana
taagctcctactgaggg

SEQ ID NO: 180585 - DNA, 17 bp, Arabidopsis thaliana
taaggaaaaccccattc

SEQ ID NO: 180586 - DNA, 17 bp, Arabidopsis thaliana
taaggaatgcttctgat

SEQ ID NO: 180587 - DNA, 17 bp, Arabidopsis thaliana
taaggatggtgagggaa

SEQ ID NO: 180588 - DNA, 17 bp, Arabidopsis thaliana
taaggtttagtggacta

SEQ ID NO: 180589 - DNA, 17 bp, Arabidopsis thaliana
taaggtttagtggactt

SEQ ID NO: 180590 - DNA, 17 bp, Arabidopsis thaliana
taagtaaatgtttatct

SEQ ID NO: 180591 - DNA, 17 bp, Arabidopsis thaliana
taagtaactgtattagc

SEQ ID NO: 180592 - DNA, 17 bp, Arabidopsis thaliana
taagtactgatgacgct

SEQ ID NO: 180593 - DNA, 17 bp, Arabidopsis thaliana
taagtactgatgatgct

SEQ ID NO: 180594 - DNA, 17 bp, Arabidopsis thaliana
taagtatccagggaatt

SEQ ID NO: 180595 - DNA, 17 bp, Arabidopsis thaliana
taagtatccagggtatt

SEQ ID NO: 180596 - DNA, 17 bp, Arabidopsis thaliana
taagtatgaacgaatta

SEQ ID NO: 180597 - DNA, 17 bp, Arabidopsis thaliana
taagtatgaacgaattc

SEQ ID NO: 180598 - DNA, 17 bp, Arabidopsis thaliana
taagtcagaatccgggc

SEQ ID NO: 180599 - DNA, 17 bp, Arabidopsis thaliana
taagtccgttcggcgga

SEQ ID NO: 180600 - DNA, 17 bp, Arabidopsis thaliana
taagtcgcatcctgtag

SEQ ID NO: 180601 - DNA, 17 bp, Arabidopsis thaliana
taagtcgcgcacagcga

SEQ ID NO: 180602 - DNA, 17 bp, Arabidopsis thaliana
taagtctaggcctccgt

SEQ ID NO: 180603 - DNA, 17 bp, Arabidopsis thaliana
taagtgactgtgttgcc

SEQ ID NO: 180604 - DNA, 17 bp, Arabidopsis thaliana
taagtggatgctcaagc

SEQ ID NO: 180605 - DNA, 17 bp, Arabidopsis thaliana
taagtggcagagtggca

SEQ ID NO: 180606 - DNA, 17 bp, Arabidopsis thaliana
taagtggcagagtggcc

SEQ ID NO: 180607 - DNA, 17 bp, Arabidopsis thaliana
taagtggcagagttgcc

SEQ ID NO: 180608 - DNA, 17 bp, Arabidopsis thaliana
taagtgtccagtgtaac

SEQ ID NO: 180609 - DNA, 17 bp, Arabidopsis thaliana
taagtgtcgtctatcca

SEQ ID NO: 180610 - DNA, 17 bp, Arabidopsis thaliana
taagtgtcgtctttcca

SEQ ID NO: 180611 - DNA, 17 bp, Arabidopsis thaliana
taagttaagatttgtga

SEQ ID NO: 180612 - DNA, 17 bp, Arabidopsis thaliana
taagttccggtgtcggg

SEQ ID NO: 180613 - DNA, 17 bp, Arabidopsis thaliana
taataactacggtctct

SEQ ID NO: 180614 - DNA, 17 bp, Arabidopsis thaliana
taataagtatccagggt

SEQ ID NO: 180615 - DNA, 17 bp, Arabidopsis thaliana
taataggcagaacccaa

SEQ ID NO: 180616 - DNA, 17 bp, Arabidopsis thaliana
taatattcaaggacaga

SEQ ID NO: 180617 - DNA, 17 bp, Arabidopsis thaliana
taatcaatctttgtgat

SEQ ID NO: 180618 - DNA, 17 bp, Arabidopsis thaliana
taatcacggaactggag

SEQ ID NO: 180619 - DNA, 17 bp, Arabidopsis thaliana
taatcatgttttccaat

SEQ ID NO: 180620 - DNA, 17 bp, Arabidopsis thaliana
taatccaggatatgcaa

SEQ ID NO: 180621 - DNA, 17 bp, Arabidopsis thaliana
taatccaggttgaaatt

SEQ ID NO: 180622 - DNA, 17 bp, Arabidopsis thaliana
taatcccacttttgtgg

SEQ ID NO: 180623 - DNA, 17 bp, Arabidopsis thaliana
taatcccacttttgttg

SEQ ID NO: 180624 - DNA, 17 bp, Arabidopsis thaliana
taatcctaccaataact

SEQ ID NO: 180625 - DNA, 17 bp, Arabidopsis thaliana
taatcggaagcgtcggt

SEQ ID NO: 180626 - DNA, 17 bp, Arabidopsis thaliana
taatctactttactgtc

SEQ ID NO: 180627 - DNA, 17 bp, Arabidopsis thaliana
taatctagattttcgat

SEQ ID NO: 180628 - DNA, 17 bp, Arabidopsis thaliana
taatctagattttcgta

SEQ ID NO: 180629 - DNA, 17 bp, Arabidopsis thaliana
taatctgcatcctgagg

SEQ ID NO: 180630 - DNA, 17 bp, Arabidopsis thaliana
taatcttctctgtatcg

SEQ ID NO: 180631 - DNA, 17 bp, Arabidopsis thaliana
taatcttgaggtcccta

SEQ ID NO: 180632 - DNA, 17 bp, Arabidopsis thaliana
taatctttaggcgcctc

SEQ ID NO: 180633 - DNA, 17 bp, Arabidopsis thaliana
taatgattaacagggac

SEQ ID NO: 180634 - DNA, 17 bp, Arabidopsis thaliana
taatgcgtgaggctggc

SEQ ID NO: 180635 - DNA, 17 bp, Arabidopsis thaliana
taatgggcttttgatta

SEQ ID NO: 180636 - DNA, 17 bp, Arabidopsis thaliana
taatggtggagaccata

SEQ ID NO: 180637 - DNA, 17 bp, Arabidopsis thaliana
taatgtaccatcgcaga

SEQ ID NO: 180638 - DNA, 17 bp, Arabidopsis thaliana
taatgtagaaactcgac

SEQ ID NO: 180639 - DNA, 17 bp, Arabidopsis thaliana
taatgtagctgcggttt

SEQ ID NO: 180640 - DNA, 17 bp, Arabidopsis thaliana
taatgtttgggagtagc

SEQ ID NO: 180641 - DNA, 17 bp, Arabidopsis thaliana
taattaccaccgagcga

SEQ ID NO: 180642 - DNA, 17 bp, Arabidopsis thaliana
taattagtgagatttgg

SEQ ID NO: 180643 - DNA, 17 bp, Arabidopsis thaliana
taattagttatgccaat

SEQ ID NO: 180644 - DNA, 17 bp, Arabidopsis thaliana
taattcacaagagactt

SEQ ID NO: 180645 - DNA, 17 bp, Arabidopsis thaliana
taattcacgggcgatgt

SEQ ID NO: 180646 - DNA, 17 bp, Arabidopsis thaliana
taattcgggtcaattct

SEQ ID NO: 180647 - DNA, 17 bp, Arabidopsis thaliana
taattcgtatccttaca

SEQ ID NO: 180648 - DNA, 17 bp, Arabidopsis thaliana
taattcgttcgagtcag

SEQ ID NO: 180649 - DNA, 17 bp, Arabidopsis thaliana
taattcgttcgagtcat

SEQ ID NO: 180650 - DNA, 17 bp, Arabidopsis thaliana
taattggaaaacatgat

SEQ ID NO: 180651 - DNA, 17 bp, Arabidopsis thaliana
taatttcaaaattgacc

SEQ ID NO: 180652 - DNA, 17 bp, Arabidopsis thaliana
taatttccagtttcttg

SEQ ID NO: 180653 - DNA, 17 bp, Arabidopsis thaliana
taatttcgaaagtgata

SEQ ID NO: 180654 - DNA, 17 bp, Arabidopsis thaliana
taatttctactctacct

SEQ ID NO: 180655 - DNA, 17 bp, Arabidopsis thaliana
tacaaagtggatttttt

SEQ ID NO: 180656 - DNA, 17 bp, Arabidopsis thaliana
tacaaatatcattccgg

SEQ ID NO: 180657 - DNA, 17 bp, Arabidopsis thaliana
tacaaatctaagtgtac

SEQ ID NO: 180658 - DNA, 17 bp, Arabidopsis thaliana
tacaacaacgaccaccg

SEQ ID NO: 180659 - DNA, 17 bp, Arabidopsis thaliana
tacaacattctgttaga

SEQ ID NO: 180660 - DNA, 17 bp, Arabidopsis thaliana
tacaacccctgtttttg

SEQ ID NO: 180661 - DNA, 17 bp, Arabidopsis thaliana
tacaactcctaatacat

SEQ ID NO: 180662 - DNA, 17 bp, Arabidopsis thaliana
tacaagcctttaaacta

SEQ ID NO: 180663 - DNA, 17 bp, Arabidopsis thaliana
tacaagcgaatagacca

SEQ ID NO: 180664 - DNA, 17 bp, Arabidopsis thaliana
tacaagcgaatgagtca

SEQ ID NO: 180665 - DNA, 17 bp, Arabidopsis thaliana
tacaaggtgttgtgaag

SEQ ID NO: 180666 - DNA, 17 bp, Arabidopsis thaliana
tacaataccccgtcgcg

SEQ ID NO: 180667 - DNA, 17 bp, Arabidopsis thaliana
tacaatctcaagatggc

SEQ ID NO: 180668 - DNA, 17 bp, Arabidopsis thaliana
tacacaccgcccgtcgc

SEQ ID NO: 180669 - DNA, 17 bp, Arabidopsis thaliana
tacacagtgccccacaa

SEQ ID NO: 180670 - DNA, 17 bp, Arabidopsis thaliana
tacacctaatggcttaa

SEQ ID NO: 180671 - DNA, 17 bp, Arabidopsis thaliana
tacacctcggagagaaa

SEQ ID NO: 180672 - DNA, 17 bp, Arabidopsis thaliana
tacacgcgaatagacca

SEQ ID NO: 180673 - DNA, 17 bp, Arabidopsis thaliana
tacactctgatggtgca

SEQ ID NO: 180674 - DNA, 17 bp, Arabidopsis thaliana
tacactctgatgttgca

SEQ ID NO: 180675 - DNA, 17 bp, Arabidopsis thaliana
tacactgcctcttccct

SEQ ID NO: 180676 - DNA, 17 bp, Arabidopsis thaliana
tacactgcttatctcga

SEQ ID NO: 180677 - DNA, 17 bp, Arabidopsis thaliana
tacactttggccgagtg

SEQ ID NO: 180678 - DNA, 17 bp, Arabidopsis thaliana
tacagagagcacgggac

SEQ ID NO: 180679 - DNA, 17 bp, Arabidopsis thaliana
tacagcaagacattgtt

SEQ ID NO: 180680 - DNA, 17 bp, Arabidopsis thaliana
tacagctgagcagcatc

SEQ ID NO: 180681 - DNA, 17 bp, Arabidopsis thaliana
tacaggatgcggatcca

SEQ ID NO: 180682 - DNA, 17 bp, Arabidopsis thaliana
tacaggccagggaggaa

SEQ ID NO: 180683 - DNA, 17 bp, Arabidopsis thaliana
tacaggcccgggtaatc

SEQ ID NO: 180684 - DNA, 17 bp, Arabidopsis thaliana
tacaggccgttctcgtt

SEQ ID NO: 180685 - DNA, 17 bp, Arabidopsis thaliana
tacaggttggcggtgtc

SEQ ID NO: 180686 - DNA, 17 bp, Arabidopsis thaliana
tacagtcaacttcctgg

SEQ ID NO: 180687 - DNA, 17 bp, Arabidopsis thaliana
tacataccgtgaagatg

SEQ ID NO: 180688 - DNA, 17 bp, Arabidopsis thaliana
tacatagaagcgcattt

SEQ ID NO: 180689 - DNA, 17 bp, Arabidopsis thaliana
tacatagacacagtttt

SEQ ID NO: 180690 - DNA, 17 bp, Arabidopsis thaliana
tacatagaccaaaccaa

SEQ ID NO: 180691 - DNA, 17 bp, Arabidopsis thaliana
tacatcagccgcgaaaa

SEQ ID NO: 180692 - DNA, 17 bp, Arabidopsis thaliana
tacatctcagaggttct

SEQ ID NO: 180693 - DNA, 17 bp, Arabidopsis thaliana
tacattagtgttgggag

SEQ ID NO: 180694 - DNA, 17 bp, Arabidopsis thaliana
tacattgtcaatggtta

SEQ ID NO: 180695 - DNA, 17 bp, Arabidopsis thaliana
tacattgttaggacttt

SEQ ID NO: 180696 - DNA, 17 bp, Arabidopsis thaliana
taccaaatctgcgccgc

SEQ ID NO: 180697 - DNA, 17 bp, Arabidopsis thaliana
taccaacctttcatcca

SEQ ID NO: 180698 - DNA, 17 bp, Arabidopsis thaliana
taccaacctttcatcga

SEQ ID NO: 180699 - DNA, 17 bp, Arabidopsis thaliana
taccaacctttcatcgt

SEQ ID NO: 180700 - DNA, 17 bp, Arabidopsis thaliana
taccaaccttttatcgt

SEQ ID NO: 180701 - DNA, 17 bp, Arabidopsis thaliana
taccaactgagctaagg

SEQ ID NO: 180702 - DNA, 17 bp, Arabidopsis thaliana
taccacatccaaggaag

SEQ ID NO: 180703 - DNA, 17 bp, Arabidopsis thaliana
taccactgagctatagg

SEQ ID NO: 180704 - DNA, 17 bp, Arabidopsis thaliana
taccactgagctatggg

SEQ ID NO: 180705 - DNA, 17 bp, Arabidopsis thaliana
taccactgcttttctat

SEQ ID NO: 180706 - DNA, 17 bp, Arabidopsis thaliana
taccagcactaatgcac

SEQ ID NO: 180707 - DNA, 17 bp, Arabidopsis thaliana
taccaggatttcgtctg

SEQ ID NO: 180708 - DNA, 17 bp, Arabidopsis thaliana
taccaggtccagacata

SEQ ID NO: 180709 - DNA, 17 bp, Arabidopsis thaliana
taccagtatcttatgcg

SEQ ID NO: 180710 - DNA, 17 bp, Arabidopsis thaliana
taccagtatgttatgcg

SEQ ID NO: 180711 - DNA, 17 bp, Arabidopsis thaliana
taccagtgtgttatgcg

SEQ ID NO: 180712 - DNA, 17 bp, Arabidopsis thaliana
taccagttaccacgcag

SEQ ID NO: 180713 - DNA, 17 bp, Arabidopsis thaliana
taccagtttgttctcca

SEQ ID NO: 180714 - DNA, 17 bp, Arabidopsis thaliana
taccatccgatcaacaa

SEQ ID NO: 180715 - DNA, 17 bp, Arabidopsis thaliana
taccatccgatcaacag

SEQ ID NO: 180716 - DNA, 17 bp, Arabidopsis thaliana
taccatctggaatacta

SEQ ID NO: 180717 - DNA, 17 bp, Arabidopsis thaliana
taccatctggaatactt

SEQ ID NO: 180718 - DNA, 17 bp, Arabidopsis thaliana
taccattcaaagcacct

SEQ ID NO: 180719 - DNA, 17 bp, Arabidopsis thaliana
tacccaaccatcggtag

SEQ ID NO: 180720 - DNA, 17 bp, Arabidopsis thaliana
tacccaaggatgacttg

SEQ ID NO: 180721 - DNA, 17 bp, Arabidopsis thaliana
tacccaatcctgacacg

SEQ ID NO: 180722 - DNA, 17 bp, Arabidopsis thaliana
tacccaatgccgacacg

SEQ ID NO: 180723 - DNA, 17 bp, Arabidopsis thaliana
taccccccgggaggttg

SEQ ID NO: 180724 - DNA, 17 bp, Arabidopsis thaliana
taccccggcggggaccg

SEQ ID NO: 180725 - DNA, 17 bp, Arabidopsis thaliana
taccctactgatgacct

SEQ ID NO: 180726 - DNA, 17 bp, Arabidopsis thaliana
taccctactgatgcccg

SEQ ID NO: 180727 - DNA, 17 bp, Arabidopsis thaliana
taccctcagaatcacga

SEQ ID NO: 180728 - DNA, 17 bp, Arabidopsis thaliana
taccctggatactatta

SEQ ID NO: 180729 - DNA, 17 bp, Arabidopsis thaliana
taccctggatacttata

SEQ ID NO: 180730 - DNA, 17 bp, Arabidopsis thaliana
taccctggatacttatt

SEQ ID NO: 180731 - DNA, 17 bp, Arabidopsis thaliana
taccgcaagagttgcag

SEQ ID NO: 180732 - DNA, 17 bp, Arabidopsis thaliana
taccgcaagatcaaact

SEQ ID NO: 180733 - DNA, 17 bp, Arabidopsis thaliana
taccgcaagatcaaagt

SEQ ID NO: 180734 - DNA, 17 bp, Arabidopsis thaliana
taccgccagcaccacca

SEQ ID NO: 180735 - DNA, 17 bp, Arabidopsis thaliana
taccgccagcaccagca

SEQ ID NO: 180736 - DNA, 17 bp, Arabidopsis thaliana
taccgcggctgctggca

SEQ ID NO: 180737 - DNA, 17 bp, Arabidopsis thaliana
taccgcgtgtcgtctgg

SEQ ID NO: 180738 - DNA, 17 bp, Arabidopsis thaliana
taccggaggtcctgctg

SEQ ID NO: 180739 - DNA, 17 bp, Arabidopsis thaliana
taccggaggtggccctg

SEQ ID NO: 180740 - DNA, 17 bp, Arabidopsis thaliana
taccggccagagaccga

SEQ ID NO: 180741 - DNA, 17 bp, Arabidopsis thaliana
taccgggcactgcaaca

SEQ ID NO: 180742 - DNA, 17 bp, Arabidopsis thaliana
taccgggctctttcgag

SEQ ID NO: 180743 - DNA, 17 bp, Arabidopsis thaliana
taccgtgcgctggatta

SEQ ID NO: 180744 - DNA, 17 bp, Arabidopsis thaliana
taccgttaacagactgt

SEQ ID NO: 180745 - DNA, 17 bp, Arabidopsis thaliana
taccgttggaaaggcgt

SEQ ID NO: 180746 - DNA, 17 bp, Arabidopsis thaliana
taccgtttggacctgcc

SEQ ID NO: 180747 - DNA, 17 bp, Arabidopsis thaliana
tacctaaccccctctga

SEQ ID NO: 180748 - DNA, 17 bp, Arabidopsis thaliana
tacctaattcgtatcct

SEQ ID NO: 180749 - DNA, 17 bp, Arabidopsis thaliana
tacctagttagggtgtc

SEQ ID NO: 180750 - DNA, 17 bp, Arabidopsis thaliana
tacctatatgggattaa

SEQ ID NO: 180751 - DNA, 17 bp, Arabidopsis thaliana
tacctcattgtgtgttt

SEQ ID NO: 180752 - DNA, 17 bp, Arabidopsis thaliana
tacctggttgaccctgc

SEQ ID NO: 180753 - DNA, 17 bp, Arabidopsis thaliana
tacctggttgatcctcc

SEQ ID NO: 180754 - DNA, 17 bp, Arabidopsis thaliana
tacctggttgatcctgc

SEQ ID NO: 180755 - DNA, 17 bp, Arabidopsis thaliana
tacctggttgttcctcc

SEQ ID NO: 180756 - DNA, 17 bp, Arabidopsis thaliana
tacctgtccaaaacaga

SEQ ID NO: 180757 - DNA, 17 bp, Arabidopsis thaliana
tacctgtgttgctgctc

SEQ ID NO: 180758 - DNA, 17 bp, Arabidopsis thaliana
tacgaaacacaggcccc

SEQ ID NO: 180759 - DNA, 17 bp, Arabidopsis thaliana
tacgaacactggctatc

SEQ ID NO: 180760 - DNA, 17 bp, Arabidopsis thaliana
tacgaatacgaaccgtg

SEQ ID NO: 180761 - DNA, 17 bp, Arabidopsis thaliana
tacgaatccgacccgat

SEQ ID NO: 180762 - DNA, 17 bp, Arabidopsis thaliana
tacgaattaggtaaatg

SEQ ID NO: 180763 - DNA, 17 bp, Arabidopsis thaliana
tacgacgagatgatcaa

SEQ ID NO: 180764 - DNA, 17 bp, Arabidopsis thaliana
tacgagaaacgccacca

SEQ ID NO: 180765 - DNA, 17 bp, Arabidopsis thaliana
tacgagaggaaccgttg

SEQ ID NO: 180766 - DNA, 17 bp, Arabidopsis thaliana
tacgagaggactgggtt

SEQ ID NO: 180767 - DNA, 17 bp, Arabidopsis thaliana
tacgagagggaccgctc

SEQ ID NO: 180768 - DNA, 17 bp, Arabidopsis thaliana
tacgagatattggtgcg

SEQ ID NO: 180769 - DNA, 17 bp, Arabidopsis thaliana
tacgagctttcattgaa

SEQ ID NO: 180770 - DNA, 17 bp, Arabidopsis thaliana
tacgaggctgcataaca

SEQ ID NO: 180771 - DNA, 17 bp, Arabidopsis thaliana
tacgatgcgactaagga

SEQ ID NO: 180772 - DNA, 17 bp, Arabidopsis thaliana
tacgcaactaaatcatt

SEQ ID NO: 180773 - DNA, 17 bp, Arabidopsis thaliana
tacgcattgagtttcgt

SEQ ID NO: 180774 - DNA, 17 bp, Arabidopsis thaliana
tacgcctatttttggaa

SEQ ID NO: 180775 - DNA, 17 bp, Arabidopsis thaliana
tacgcgacggggtatta

SEQ ID NO: 180776 - DNA, 17 bp, Arabidopsis thaliana
tacgcgacggggtattg

SEQ ID NO: 180777 - DNA, 17 bp, Arabidopsis thaliana
tacgctatgttggactt

SEQ ID NO: 180778 - DNA, 17 bp, Arabidopsis thaliana
tacgctcgatgatgagt

SEQ ID NO: 180779 - DNA, 17 bp, Arabidopsis thaliana
tacgctctggatacatt

SEQ ID NO: 180780 - DNA, 17 bp, Arabidopsis thaliana
tacggacaagtggaata

SEQ ID NO: 180781 - DNA, 17 bp, Arabidopsis thaliana
tacggacaagtggaatc

SEQ ID NO: 180782 - DNA, 17 bp, Arabidopsis thaliana
tacggaccaccgcaacc

SEQ ID NO: 180783 - DNA, 17 bp, Arabidopsis thaliana
tacggaccaggcttcat

SEQ ID NO: 180784 - DNA, 17 bp, Arabidopsis thaliana
tacgggttcttcaggat

SEQ ID NO: 180785 - DNA, 17 bp, Arabidopsis thaliana
tacggtggcggcctaag

SEQ ID NO: 180786 - DNA, 17 bp, Arabidopsis thaliana
tacggtgtcggttcgcc

SEQ ID NO: 180787 - DNA, 17 bp, Arabidopsis thaliana
tacgtacgggcgctacc

SEQ ID NO: 180788 - DNA, 17 bp, Arabidopsis thaliana
tacgtccctgccctttg

SEQ ID NO: 180789 - DNA, 17 bp, Arabidopsis thaliana
tacgtccctgttctttg

SEQ ID NO: 180790 - DNA, 17 bp, Arabidopsis thaliana
tacgtcggtaaggtcac

SEQ ID NO: 180791 - DNA, 17 bp, Arabidopsis thaliana
tacgttacctttttgtt

SEQ ID NO: 180792 - DNA, 17 bp, Arabidopsis thaliana
tacgttgggcaactgcg

SEQ ID NO: 180793 - DNA, 17 bp, Arabidopsis thaliana
tacgttgtctgttcgac

SEQ ID NO: 180794 - DNA, 17 bp, Arabidopsis thaliana
tacgttgtggatgacag

SEQ ID NO: 180795 - DNA, 17 bp, Arabidopsis thaliana
tactaagtaacacaatt

SEQ ID NO: 180796 - DNA, 17 bp, Arabidopsis thaliana
tactaagtccaacataa

SEQ ID NO: 180797 - DNA, 17 bp, Arabidopsis thaliana
tactaagtccaacatag

SEQ ID NO: 180798 - DNA, 17 bp, Arabidopsis thaliana
tactaatagggcattca

SEQ ID NO: 180799 - DNA, 17 bp, Arabidopsis thaliana
tactaatgtttgggaga

SEQ ID NO: 180800 - DNA, 17 bp, Arabidopsis thaliana
tactaatgtttgggagt

SEQ ID NO: 180801 - DNA, 17 bp, Arabidopsis thaliana
tactaggatgggtgacc

SEQ ID NO: 180802 - DNA, 17 bp, Arabidopsis thaliana
tactatagcgttgccta

SEQ ID NO: 180803 - DNA, 17 bp, Arabidopsis thaliana
tactatcctgggcctac

SEQ ID NO: 180804 - DNA, 17 bp, Arabidopsis thaliana
tactatttccatcttcg

SEQ ID NO: 180805 - DNA, 17 bp, Arabidopsis thaliana
tactcacctctctttct

SEQ ID NO: 180806 - DNA, 17 bp, Arabidopsis thaliana
tactcactttcatacag

SEQ ID NO: 180807 - DNA, 17 bp, Arabidopsis thaliana
tactcagtgatatgatt

SEQ ID NO: 180808 - DNA, 17 bp, Arabidopsis thaliana
tactcatcgaggcctgg

SEQ ID NO: 180809 - DNA, 17 bp, Arabidopsis thaliana
tactcatcgaggcgatc

SEQ ID NO: 180810 - DNA, 17 bp, Arabidopsis thaliana
tactcattccaattacc

SEQ ID NO: 180811 - DNA, 17 bp, Arabidopsis thaliana
tactcattttcgacggc

SEQ ID NO: 180812 - DNA, 17 bp, Arabidopsis thaliana
tactcgcatcctgtaga

SEQ ID NO: 180813 - DNA, 17 bp, Arabidopsis thaliana
tactcggcgaaatctac

SEQ ID NO: 180814 - DNA, 17 bp, Arabidopsis thaliana
tactctggcctatgtgt

SEQ ID NO: 180815 - DNA, 17 bp, Arabidopsis thaliana
tactgaattgtcaacga

SEQ ID NO: 180816 - DNA, 17 bp, Arabidopsis thaliana
tactgaattgtcaacgt

SEQ ID NO: 180817 - DNA, 17 bp, Arabidopsis thaliana
tactgagccgcgccaat

SEQ ID NO: 180818 - DNA, 17 bp, Arabidopsis thaliana
tactgagggtcggcaag

SEQ ID NO: 180819 - DNA, 17 bp, Arabidopsis thaliana
tactgagggtcggcaat

SEQ ID NO: 180820 - DNA, 17 bp, Arabidopsis thaliana
tactgatgatgctgacc

SEQ ID NO: 180821 - DNA, 17 bp, Arabidopsis thaliana
tactgatgcccgcgtgc

SEQ ID NO: 180822 - DNA, 17 bp, Arabidopsis thaliana
tactgcaagggctggct

SEQ ID NO: 180823 - DNA, 17 bp, Arabidopsis thaliana
tactgcacaggcttggc

SEQ ID NO: 180824 - DNA, 17 bp, Arabidopsis thaliana
tactgcacgggcttggc

SEQ ID NO: 180825 - DNA, 17 bp, Arabidopsis thaliana
tactgcgatgtgtgatt

SEQ ID NO: 180826 - DNA, 17 bp, Arabidopsis thaliana
tactgcgctctccaagt

SEQ ID NO: 180827 - DNA, 17 bp, Arabidopsis thaliana
tactgtacataacttga

SEQ ID NO: 180828 - DNA, 17 bp, Arabidopsis thaliana
tactgtatttgactgca

SEQ ID NO: 180829 - DNA, 17 bp, Arabidopsis thaliana
tacttaatgaacagttg

SEQ ID NO: 180830 - DNA, 17 bp, Arabidopsis thaliana
tacttcaaaccggtgat

SEQ ID NO: 180831 - DNA, 17 bp, Arabidopsis thaliana
tacttgagagatcaagt

SEQ ID NO: 180832 - DNA, 17 bp, Arabidopsis thaliana
tacttgggtatcaataa

SEQ ID NO: 180833 - DNA, 17 bp, Arabidopsis thaliana
tacttgggtatcaatag

SEQ ID NO: 180834 - DNA, 17 bp, Arabidopsis thaliana
tactttactgccttcaa

SEQ ID NO: 180835 - DNA, 17 bp, Arabidopsis thaliana
tactttactgccttcct

SEQ ID NO: 180836 - DNA, 17 bp, Arabidopsis thaliana
tactttactgtcttcaa

SEQ ID NO: 180837 - DNA, 17 bp, Arabidopsis thaliana
tactttactgtcttcct

SEQ ID NO: 180838 - DNA, 17 bp, Arabidopsis thaliana
tactttgagagatcaag

SEQ ID NO: 180839 - DNA, 17 bp, Arabidopsis thaliana
tactttgttactggaga

SEQ ID NO: 180840 - DNA, 17 bp, Arabidopsis thaliana
tacttttcaaaactggt

SEQ ID NO: 180841 - DNA, 17 bp, Arabidopsis thaliana
tactttttctactatcc

SEQ ID NO: 180842 - DNA, 17 bp, Arabidopsis thaliana
tagaaaaaagacaattg

SEQ ID NO: 180843 - DNA, 17 bp, Arabidopsis thaliana
tagaaacgctctccagt

SEQ ID NO: 180844 - DNA, 17 bp, Arabidopsis thaliana
tagaaacgtgatggtgg

SEQ ID NO: 180845 - DNA, 17 bp, Arabidopsis thaliana
tagaaagggaaagggaa

SEQ ID NO: 180846 - DNA, 17 bp, Arabidopsis thaliana
tagaaatggatctgaaa

SEQ ID NO: 180847 - DNA, 17 bp, Arabidopsis thaliana
tagaagatttttcttta

SEQ ID NO: 180848 - DNA, 17 bp, Arabidopsis thaliana
tagaatcctttgcagac

SEQ ID NO: 180849 - DNA, 17 bp, Arabidopsis thaliana
tagaatttgtctctgtt

SEQ ID NO: 180850 - DNA, 17 bp, Arabidopsis thaliana
tagacagtaagagtttc

SEQ ID NO: 180851 - DNA, 17 bp, Arabidopsis thaliana
tagaccatttgtgagaa

SEQ ID NO: 180852 - DNA, 17 bp, Arabidopsis thaliana
tagaccgatgtcaacaa

SEQ ID NO: 180853 - DNA, 17 bp, Arabidopsis thaliana
tagagaaatcgtagttt

SEQ ID NO: 180854 - DNA, 17 bp, Arabidopsis thaliana
tagagtcgaagctgcgg

SEQ ID NO: 180855 - DNA, 17 bp, Arabidopsis thaliana
tagatacactctgatgg

SEQ ID NO: 180856 - DNA, 17 bp, Arabidopsis thaliana
tagatatatgcatagtt

SEQ ID NO: 180857 - DNA, 17 bp, Arabidopsis thaliana
tagattgcagccaaggg

SEQ ID NO: 180858 - DNA, 17 bp, Arabidopsis thaliana
tagattgcagccgagga

SEQ ID NO: 180859 - DNA, 17 bp, Arabidopsis thaliana
tagattttttgagacaa

SEQ ID NO: 180860 - DNA, 17 bp, Arabidopsis thaliana
tagcaactgttctttag

SEQ ID NO: 180861 - DNA, 17 bp, Arabidopsis thaliana
tagcattaacgcttgga

SEQ ID NO: 180862 - DNA, 17 bp, Arabidopsis thaliana
tagccaaaaggccgaca

SEQ ID NO: 180863 - DNA, 17 bp, Arabidopsis thaliana
tagccaaatgcctcgtc

SEQ ID NO: 180864 - DNA, 17 bp, Arabidopsis thaliana
tagccaaggaagactta

SEQ ID NO: 180865 - DNA, 17 bp, Arabidopsis thaliana
tagccaaggacgacttg

SEQ ID NO: 180866 - DNA, 17 bp, Arabidopsis thaliana
tagccaaggatgaatta

SEQ ID NO: 180867 - DNA, 17 bp, Arabidopsis thaliana
tagccaaggatgacaaa

SEQ ID NO: 180868 - DNA, 17 bp, Arabidopsis thaliana
tagccaaggatgactta

SEQ ID NO: 180869 - DNA, 17 bp, Arabidopsis thaliana
tagccaaggatgacttg

SEQ ID NO: 180870 - DNA, 17 bp, Arabidopsis thaliana
tagccccgaaaatggat

SEQ ID NO: 180871 - DNA, 17 bp, Arabidopsis thaliana
tagcccggattctgacg

SEQ ID NO: 180872 - DNA, 17 bp, Arabidopsis thaliana
tagcctattgttggact

SEQ ID NO: 180873 - DNA, 17 bp, Arabidopsis thaliana
tagcgaaatgcgatact

SEQ ID NO: 180874 - DNA, 17 bp, Arabidopsis thaliana
tagcgacgtcgcttttt

SEQ ID NO: 180875 - DNA, 17 bp, Arabidopsis thaliana
tagcgacgttgcttttt

SEQ ID NO: 180876 - DNA, 17 bp, Arabidopsis thaliana
tagcgtcgctcagaacc

SEQ ID NO: 180877 - DNA, 17 bp, Arabidopsis thaliana
tagctaaggatttgcat

SEQ ID NO: 180878 - DNA, 17 bp, Arabidopsis thaliana
tagctacgtggaggcat

SEQ ID NO: 180879 - DNA, 17 bp, Arabidopsis thaliana
tagctagatagattttt

SEQ ID NO: 180880 - DNA, 17 bp, Arabidopsis thaliana
tagctatattaaccgat

SEQ ID NO: 180881 - DNA, 17 bp, Arabidopsis thaliana
tagctatctgaggcacg

SEQ ID NO: 180882 - DNA, 17 bp, Arabidopsis thaliana
tagctcaggagggatag

SEQ ID NO: 180883 - DNA, 17 bp, Arabidopsis thaliana
tagctcgacgccaggat

SEQ ID NO: 180884 - DNA, 17 bp, Arabidopsis thaliana
tagcttccaactcattc

SEQ ID NO: 180885 - DNA, 17 bp, Arabidopsis thaliana
tagcttccgactcattc

SEQ ID NO: 180886 - DNA, 17 bp, Arabidopsis thaliana
tagcttcgcctctgccg

SEQ ID NO: 180887 - DNA, 17 bp, Arabidopsis thaliana
taggaagattcctaaca

SEQ ID NO: 180888 - DNA, 17 bp, Arabidopsis thaliana
taggatgggtgacctcc

SEQ ID NO: 180889 - DNA, 17 bp, Arabidopsis thaliana
tagggttggatactttt

SEQ ID NO: 180890 - DNA, 17 bp, Arabidopsis thaliana
tagggttgtcgatagtt

SEQ ID NO: 180891 - DNA, 17 bp, Arabidopsis thaliana
taggtattcgagtatat

SEQ ID NO: 180892 - DNA, 17 bp, Arabidopsis thaliana
taggtctaattcctttg

SEQ ID NO: 180893 - DNA, 17 bp, Arabidopsis thaliana
taggttcaaacactagg

SEQ ID NO: 180894 - DNA, 17 bp, Arabidopsis thaliana
taggttcgccccctacc

SEQ ID NO: 180895 - DNA, 17 bp, Arabidopsis thaliana
tagtaagaagacagaaa

SEQ ID NO: 180896 - DNA, 17 bp, Arabidopsis thaliana
tagtatgaatcaggtat

SEQ ID NO: 180897 - DNA, 17 bp, Arabidopsis thaliana
tagtcaacgcgagctga

SEQ ID NO: 180898 - DNA, 17 bp, Arabidopsis thaliana
tagtcacatcctgtaga

SEQ ID NO: 180899 - DNA, 17 bp, Arabidopsis thaliana
tagtccgactttgtgaa

SEQ ID NO: 180900 - DNA, 17 bp, Arabidopsis thaliana
tagtccggttttggata

SEQ ID NO: 180901 - DNA, 17 bp, Arabidopsis thaliana
tagtccggttttggtta

SEQ ID NO: 180902 - DNA, 17 bp, Arabidopsis thaliana
tagtcgcaccctgtatg

SEQ ID NO: 180903 - DNA, 17 bp, Arabidopsis thaliana
tagtcgcatccagtaga

SEQ ID NO: 180904 - DNA, 17 bp, Arabidopsis thaliana
tagtcgcatcccgtaga

SEQ ID NO: 180905 - DNA, 17 bp, Arabidopsis thaliana
tagtcgcatccggtaga

SEQ ID NO: 180906 - DNA, 17 bp, Arabidopsis thaliana
tagtcgcatcctgagat

SEQ ID NO: 180907 - DNA, 17 bp, Arabidopsis thaliana
tagtcgcatcctgtaga

SEQ ID NO: 180908 - DNA, 17 bp, Arabidopsis thaliana
tagtcgcatcctgtagt

SEQ ID NO: 180909 - DNA, 17 bp, Arabidopsis thaliana
tagtcgcatcctgtata

SEQ ID NO: 180910 - DNA, 17 bp, Arabidopsis thaliana
tagtcgcatcctgtgat

SEQ ID NO: 180911 - DNA, 17 bp, Arabidopsis thaliana
tagtcgcatccttagat

SEQ ID NO: 180912 - DNA, 17 bp, Arabidopsis thaliana
tagtcgcatctgtcgat

SEQ ID NO: 180913 - DNA, 17 bp, Arabidopsis thaliana
tagtcgcattctgtaga

SEQ ID NO: 180914 - DNA, 17 bp, Arabidopsis thaliana
tagtctaagtcatgctt

SEQ ID NO: 180915 - DNA, 17 bp, Arabidopsis thaliana
tagtctctgcaaatata

SEQ ID NO: 180916 - DNA, 17 bp, Arabidopsis thaliana
tagtctcttttacaagg

SEQ ID NO: 180917 - DNA, 17 bp, Arabidopsis thaliana
tagtcttacgctggcca

SEQ ID NO: 180918 - DNA, 17 bp, Arabidopsis thaliana
tagtctttgatctgatt

SEQ ID NO: 180919 - DNA, 17 bp, Arabidopsis thaliana
tagtgagatttgggatg

SEQ ID NO: 180920 - DNA, 17 bp, Arabidopsis thaliana
tagtgatcctgttgtga

SEQ ID NO: 180921 - DNA, 17 bp, Arabidopsis thaliana
tagtggcctaccatggt

SEQ ID NO: 180922 - DNA, 17 bp, Arabidopsis thaliana
tagttaagccacaatcc

SEQ ID NO: 180923 - DNA, 17 bp, Arabidopsis thaliana
tagttagatatgaggtg

SEQ ID NO: 180924 - DNA, 17 bp, Arabidopsis thaliana
tagttagcaggctgagg

SEQ ID NO: 180925 - DNA, 17 bp, Arabidopsis thaliana
tagttcgtcgatatgtt

SEQ ID NO: 180926 - DNA, 17 bp, Arabidopsis thaliana
tagttgaacggatggtt

SEQ ID NO: 180927 - DNA, 17 bp, Arabidopsis thaliana
tagttgaccggatggtt

SEQ ID NO: 180928 - DNA, 17 bp, Arabidopsis thaliana
tagttgctggagcgatt

SEQ ID NO: 180929 - DNA, 17 bp, Arabidopsis thaliana
tagttggtggagcgatt

SEQ ID NO: 180930 - DNA, 17 bp, Arabidopsis thaliana
tagtttaatggcctgcc

SEQ ID NO: 180931 - DNA, 17 bp, Arabidopsis thaliana
tagtttaatggcctttt

SEQ ID NO: 180932 - DNA, 17 bp, Arabidopsis thaliana
tagtttacatgcaaaag

SEQ ID NO: 180933 - DNA, 17 bp, Arabidopsis thaliana
tagtttatctgggtcgg

SEQ ID NO: 180934 - DNA, 17 bp, Arabidopsis thaliana
tagtttgagattgcgtt

SEQ ID NO: 180935 - DNA, 17 bp, Arabidopsis thaliana
tagtttgggaatgctgc

SEQ ID NO: 180936 - DNA, 17 bp, Arabidopsis thaliana
tagttttacgttgggca

SEQ ID NO: 180937 - DNA, 17 bp, Arabidopsis thaliana
tataaaacaacccacgg

SEQ ID NO: 180938 - DNA, 17 bp, Arabidopsis thaliana
tataagcctgcctgact

SEQ ID NO: 180939 - DNA, 17 bp, Arabidopsis thaliana
tataagcgatgtacatg

SEQ ID NO: 180940 - DNA, 17 bp, Arabidopsis thaliana
tataattaccaccgagc

SEQ ID NO: 180941 - DNA, 17 bp, Arabidopsis thaliana
tatacagaaggcggtct

SEQ ID NO: 180942 - DNA, 17 bp, Arabidopsis thaliana
tatacagagactcaaac

SEQ ID NO: 180943 - DNA, 17 bp, Arabidopsis thaliana
tatacatgtcgcagatc

SEQ ID NO: 180944 - DNA, 17 bp, Arabidopsis thaliana
tataccactctttatta

SEQ ID NO: 180945 - DNA, 17 bp, Arabidopsis thaliana
tataccaggcaggggtg

SEQ ID NO: 180946 - DNA, 17 bp, Arabidopsis thaliana
tataccgcaagatcaaa

SEQ ID NO: 180947 - DNA, 17 bp, Arabidopsis thaliana
tatacggtctgaaacag

SEQ ID NO: 180948 - DNA, 17 bp, Arabidopsis thaliana
tatactttgagagatca

SEQ ID NO: 180949 - DNA, 17 bp, Arabidopsis thaliana
tatagaaacgctctcca

SEQ ID NO: 180950 - DNA, 17 bp, Arabidopsis thaliana
tatagacctttggatca

SEQ ID NO: 180951 - DNA, 17 bp, Arabidopsis thaliana
tatagaccttttgatca

SEQ ID NO: 180952 - DNA, 17 bp, Arabidopsis thaliana
tataggcctggttcact

SEQ ID NO: 180953 - DNA, 17 bp, Arabidopsis thaliana
tatagggttggatactt

SEQ ID NO: 180954 - DNA, 17 bp, Arabidopsis thaliana
tatagtgacggccattg

SEQ ID NO: 180955 - DNA, 17 bp, Arabidopsis thaliana
tatatccaacgtttact

SEQ ID NO: 180956 - DNA, 17 bp, Arabidopsis thaliana
tatatcccatttctacc

SEQ ID NO: 180957 - DNA, 17 bp, Arabidopsis thaliana
tatatccgcatttgcgc

SEQ ID NO: 180958 - DNA, 17 bp, Arabidopsis thaliana
tatatcgggtccgagga

SEQ ID NO: 180959 - DNA, 17 bp, Arabidopsis thaliana
tatatcgtccgttgggc

SEQ ID NO: 180960 - DNA, 17 bp, Arabidopsis thaliana
tatatggggatgtaacg

SEQ ID NO: 180961 - DNA, 17 bp, Arabidopsis thaliana
tatatgtttcagtctta

SEQ ID NO: 180962 - DNA, 17 bp, Arabidopsis thaliana
tatattagcaacgtttg

SEQ ID NO: 180963 - DNA, 17 bp, Arabidopsis thaliana
tatattgagacctattt

SEQ ID NO: 180964 - DNA, 17 bp, Arabidopsis thaliana
tatatttgcagagacta

SEQ ID NO: 180965 - DNA, 17 bp, Arabidopsis thaliana
tatcaagatccatctta

SEQ ID NO: 180966 - DNA, 17 bp, Arabidopsis thaliana
tatcaagcggtgtcttc

SEQ ID NO: 180967 - DNA, 17 bp, Arabidopsis thaliana
tatcaatagggttttgg

SEQ ID NO: 180968 - DNA, 17 bp, Arabidopsis thaliana
tatcaatcctaaagctc

SEQ ID NO: 180969 - DNA, 17 bp, Arabidopsis thaliana
tatcactttgtttacca

SEQ ID NO: 180970 - DNA, 17 bp, Arabidopsis thaliana
tatcagagtagttatga

SEQ ID NO: 180971 - DNA, 17 bp, Arabidopsis thaliana
tatcagcaatatcactt

SEQ ID NO: 180972 - DNA, 17 bp, Arabidopsis thaliana
tatcagctccaagagga

SEQ ID NO: 180973 - DNA, 17 bp, Arabidopsis thaliana
tatcagctttcgatttg

SEQ ID NO: 180974 - DNA, 17 bp, Arabidopsis thaliana
tatcatccttctggttt

SEQ ID NO: 180975 - DNA, 17 bp, Arabidopsis thaliana
tatcatcgtcttcgagg

SEQ ID NO: 180976 - DNA, 17 bp, Arabidopsis thaliana
tatcatctggacggcag

SEQ ID NO: 180977 - DNA, 17 bp, Arabidopsis thaliana
tatcattgaaactggaa

SEQ ID NO: 180978 - DNA, 17 bp, Arabidopsis thaliana
tatccaaccctattaac

SEQ ID NO: 180979 - DNA, 17 bp, Arabidopsis thaliana
tatccaacgtttactat

SEQ ID NO: 180980 - DNA, 17 bp, Arabidopsis thaliana
tatccaagaagaaatta

SEQ ID NO: 180981 - DNA, 17 bp, Arabidopsis thaliana
tatccaaggatgacttg

SEQ ID NO: 180982 - DNA, 17 bp, Arabidopsis thaliana
tatccaatgctttttct

SEQ ID NO: 180983 - DNA, 17 bp, Arabidopsis thaliana
tatccaattctacagcg

SEQ ID NO: 180984 - DNA, 17 bp, Arabidopsis thaliana
tatccagaccgcccacc

SEQ ID NO: 180985 - DNA, 17 bp, Arabidopsis thaliana
tatccagggtattccaa

SEQ ID NO: 180986 - DNA, 17 bp, Arabidopsis thaliana
tatccatttcagtgaac

SEQ ID NO: 180987 - DNA, 17 bp, Arabidopsis thaliana
tatcccacaggtttcca

SEQ ID NO: 180988 - DNA, 17 bp, Arabidopsis thaliana
tatcccatgctaatgta

SEQ ID NO: 180989 - DNA, 17 bp, Arabidopsis thaliana
tatccccatcacgatga

SEQ ID NO: 180990 - DNA, 17 bp, Arabidopsis thaliana
tatcccccgtgttttgt

SEQ ID NO: 180991 - DNA, 17 bp, Arabidopsis thaliana
tatcccggcgatccatc

SEQ ID NO: 180992 - DNA, 17 bp, Arabidopsis thaliana
tatccctacttggcgcg

SEQ ID NO: 180993 - DNA, 17 bp, Arabidopsis thaliana
tatccctcctgagcatg

SEQ ID NO: 180994 - DNA, 17 bp, Arabidopsis thaliana
tatccctcctgagctcg

SEQ ID NO: 180995 - DNA, 17 bp, Arabidopsis thaliana
tatccctcctgagcttg

SEQ ID NO: 180996 - DNA, 17 bp, Arabidopsis thaliana
tatccctcctgagtttg

SEQ ID NO: 180997 - DNA, 17 bp, Arabidopsis thaliana
tatccctcctgcggacc

SEQ ID NO: 180998 - DNA, 17 bp, Arabidopsis thaliana
tatccctcctgggcttg

SEQ ID NO: 180999 - DNA, 17 bp, Arabidopsis thaliana
tatccgggaggatgtac

SEQ ID NO: 181000 - DNA, 17 bp, Arabidopsis thaliana
tatccgggctagaagcg

SEQ ID NO: 181001 - DNA, 17 bp, Arabidopsis thaliana
tatccggtggaccaggt

SEQ ID NO: 181002 - DNA, 17 bp, Arabidopsis thaliana
tatccgtcggaaagccg

SEQ ID NO: 181003 - DNA, 17 bp, Arabidopsis thaliana
tatcctccaggctgagt

SEQ ID NO: 181004 - DNA, 17 bp, Arabidopsis thaliana
tatcctcctgagcttga

SEQ ID NO: 181005 - DNA, 17 bp, Arabidopsis thaliana
tatcctcgtggatgtcg

SEQ ID NO: 181006 - DNA, 17 bp, Arabidopsis thaliana
tatcctgattttgtgct

SEQ ID NO: 181007 - DNA, 17 bp, Arabidopsis thaliana
tatccttacaatctcaa

SEQ ID NO: 181008 - DNA, 17 bp, Arabidopsis thaliana
tatccttgaatatgttc

SEQ ID NO: 181009 - DNA, 17 bp, Arabidopsis thaliana
tatcgaaaccaaatgag

SEQ ID NO: 181010 - DNA, 17 bp, Arabidopsis thaliana
tatcgatcagatgttgg

SEQ ID NO: 181011 - DNA, 17 bp, Arabidopsis thaliana
tatcgcacaataggaca

SEQ ID NO: 181012 - DNA, 17 bp, Arabidopsis thaliana
tatcgcacaataggact

SEQ ID NO: 181013 - DNA, 17 bp, Arabidopsis thaliana
tatcgcacggacttggc

SEQ ID NO: 181014 - DNA, 17 bp, Arabidopsis thaliana
tatcgcgacgcgggcat

SEQ ID NO: 181015 - DNA, 17 bp, Arabidopsis thaliana
tatcggagtatgttgta

SEQ ID NO: 181016 - DNA, 17 bp, Arabidopsis thaliana
tatcggcttctaccgca

SEQ ID NO: 181017 - DNA, 17 bp, Arabidopsis thaliana
tatcgggaagcacacca

SEQ ID NO: 181018 - DNA, 17 bp, Arabidopsis thaliana
tatcgggagaatgaacg

SEQ ID NO: 181019 - DNA, 17 bp, Arabidopsis thaliana
tatcggtacgagtgtga

SEQ ID NO: 181020 - DNA, 17 bp, Arabidopsis thaliana
tatcggtgcgtctttca

SEQ ID NO: 181021 - DNA, 17 bp, Arabidopsis thaliana
tatcgtccagcggttag

SEQ ID NO: 181022 - DNA, 17 bp, Arabidopsis thaliana
tatcgtgggcgagggca

SEQ ID NO: 181023 - DNA, 17 bp, Arabidopsis thaliana
tatcgttgccatgaatt

SEQ ID NO: 181024 - DNA, 17 bp, Arabidopsis thaliana
tatctacaggatcgact

SEQ ID NO: 181025 - DNA, 17 bp, Arabidopsis thaliana
tatctacaggatgcgac

SEQ ID NO: 181026 - DNA, 17 bp, Arabidopsis thaliana
tatctagctagttttca

SEQ ID NO: 181027 - DNA, 17 bp, Arabidopsis thaliana
tatctatctctacctct

SEQ ID NO: 181028 - DNA, 17 bp, Arabidopsis thaliana
tatctcccaatttttta

SEQ ID NO: 181029 - DNA, 17 bp, Arabidopsis thaliana
tatctccctggaggtcg

SEQ ID NO: 181030 - DNA, 17 bp, Arabidopsis thaliana
tatctcctctttgttta

SEQ ID NO: 181031 - DNA, 17 bp, Arabidopsis thaliana
tatctcgaatttggaat

SEQ ID NO: 181032 - DNA, 17 bp, Arabidopsis thaliana
tatctctcctgagcttg

SEQ ID NO: 181033 - DNA, 17 bp, Arabidopsis thaliana
tatctctcctgcgaaga

SEQ ID NO: 181034 - DNA, 17 bp, Arabidopsis thaliana
tatctctcctgcgaagc

SEQ ID NO: 181035 - DNA, 17 bp, Arabidopsis thaliana
tatctctggaacgtcgc

SEQ ID NO: 181036 - DNA, 17 bp, Arabidopsis thaliana
tatctggttttcaccca

SEQ ID NO: 181037 - DNA, 17 bp, Arabidopsis thaliana
tatcttaagtgtcgtct

SEQ ID NO: 181038 - DNA, 17 bp, Arabidopsis thaliana
tatcttcacatgcatcg

SEQ ID NO: 181039 - DNA, 17 bp, Arabidopsis thaliana
tatcttcgtttatcagg

SEQ ID NO: 181040 - DNA, 17 bp, Arabidopsis thaliana
tatctttatcatccttc

SEQ ID NO: 181041 - DNA, 17 bp, Arabidopsis thaliana
tatctttatcgtccttc

SEQ ID NO: 181042 - DNA, 17 bp, Arabidopsis thaliana
tatctttattaacagac

SEQ ID NO: 181043 - DNA, 17 bp, Arabidopsis thaliana
tatctttgtttgtttag

SEQ ID NO: 181044 - DNA, 17 bp, Arabidopsis thaliana
tatgaaaaaaaatccat

SEQ ID NO: 181045 - DNA, 17 bp, Arabidopsis thaliana
tatgaacgaattcagaa

SEQ ID NO: 181046 - DNA, 17 bp, Arabidopsis thaliana
tatgaacgaattcagac

SEQ ID NO: 181047 - DNA, 17 bp, Arabidopsis thaliana
tatgaagatggttcccc

SEQ ID NO: 181048 - DNA, 17 bp, Arabidopsis thaliana
tatgaatcaggtatgaa

SEQ ID NO: 181049 - DNA, 17 bp, Arabidopsis thaliana
tatgaatcaggtatgtc

SEQ ID NO: 181050 - DNA, 17 bp, Arabidopsis thaliana
tatgaattcggctcgct

SEQ ID NO: 181051 - DNA, 17 bp, Arabidopsis thaliana
tatgaccataggttgac

SEQ ID NO: 181052 - DNA, 17 bp, Arabidopsis thaliana
tatgacccaataagcca

SEQ ID NO: 181053 - DNA, 17 bp, Arabidopsis thaliana
tatgactgaacgcctct

SEQ ID NO: 181054 - DNA, 17 bp, Arabidopsis thaliana
tatgactgtgctgtaga

SEQ ID NO: 181055 - DNA, 17 bp, Arabidopsis thaliana
tatgactgtgctgtata

SEQ ID NO: 181056 - DNA, 17 bp, Arabidopsis thaliana
tatgactgtgttgtaga

SEQ ID NO: 181057 - DNA, 17 bp, Arabidopsis thaliana
tatgagagtattataag

SEQ ID NO: 181058 - DNA, 17 bp, Arabidopsis thaliana
tatgagtgtcttttcga

SEQ ID NO: 181059 - DNA, 17 bp, Arabidopsis thaliana
tatgatactcattttcg

SEQ ID NO: 181060 - DNA, 17 bp, Arabidopsis thaliana
tatgatcaaaacagatg

SEQ ID NO: 181061 - DNA, 17 bp, Arabidopsis thaliana
tatgatcggttctaacg

SEQ ID NO: 181062 - DNA, 17 bp, Arabidopsis thaliana
tatgatgaggcaggtcc

SEQ ID NO: 181063 - DNA, 17 bp, Arabidopsis thaliana
tatgatgatagtccaac

SEQ ID NO: 181064 - DNA, 17 bp, Arabidopsis thaliana
tatgatggtagtccaac

SEQ ID NO: 181065 - DNA, 17 bp, Arabidopsis thaliana
tatgatggtagtccgtc

SEQ ID NO: 181066 - DNA, 17 bp, Arabidopsis thaliana
tatgattctgttgagca

SEQ ID NO: 181067 - DNA, 17 bp, Arabidopsis thaliana
tatgattgaaatcttgt

SEQ ID NO: 181068 - DNA, 17 bp, Arabidopsis thaliana
tatgcaaaagagtaaga

SEQ ID NO: 181069 - DNA, 17 bp, Arabidopsis thaliana
tatgcaaacatctaaca

SEQ ID NO: 181070 - DNA, 17 bp, Arabidopsis thaliana
tatgcacgagcattcgt

SEQ ID NO: 181071 - DNA, 17 bp, Arabidopsis thaliana
tatgcacgtgcattcgt

SEQ ID NO: 181072 - DNA, 17 bp, Arabidopsis thaliana
tatgccaatggattttt

SEQ ID NO: 181073 - DNA, 17 bp, Arabidopsis thaliana
tatgccaggctattata

SEQ ID NO: 181074 - DNA, 17 bp, Arabidopsis thaliana
tatgccatatgctgagc

SEQ ID NO: 181075 - DNA, 17 bp, Arabidopsis thaliana
tatgcccgacaaaccga

SEQ ID NO: 181076 - DNA, 17 bp, Arabidopsis thaliana
tatgcccgacaaaccgg

SEQ ID NO: 181077 - DNA, 17 bp, Arabidopsis thaliana
tatgccgtcgtctatga

SEQ ID NO: 181078 - DNA, 17 bp, Arabidopsis thaliana
tatgcgaaagaaaacaa

SEQ ID NO: 181079 - DNA, 17 bp, Arabidopsis thaliana
tatgcgtcctatcttcc

SEQ ID NO: 181080 - DNA, 17 bp, Arabidopsis thaliana
tatgcgtgtcatccttg

SEQ ID NO: 181081 - DNA, 17 bp, Arabidopsis thaliana
tatgctccctgccagag

SEQ ID NO: 181082 - DNA, 17 bp, Arabidopsis thaliana
tatgctgccatcttgag

SEQ ID NO: 181083 - DNA, 17 bp, Arabidopsis thaliana
tatgctgttgagagatg

SEQ ID NO: 181084 - DNA, 17 bp, Arabidopsis thaliana
tatgcttcaatacgaac

SEQ ID NO: 181085 - DNA, 17 bp, Arabidopsis thaliana
tatgcttttcgacgatt

SEQ ID NO: 181086 - DNA, 17 bp, Arabidopsis thaliana
tatggaaatattccaaa

SEQ ID NO: 181087 - DNA, 17 bp, Arabidopsis thaliana
tatggaagaaattgtaa

SEQ ID NO: 181088 - DNA, 17 bp, Arabidopsis thaliana
tatggaagaaattgtag

SEQ ID NO: 181089 - DNA, 17 bp, Arabidopsis thaliana
tatgggacggtattggg

SEQ ID NO: 181090 - DNA, 17 bp, Arabidopsis thaliana
tatgggattaaagacct

SEQ ID NO: 181091 - DNA, 17 bp, Arabidopsis thaliana
tatggggatgggacgtt

SEQ ID NO: 181092 - DNA, 17 bp, Arabidopsis thaliana
tatggggtcaaacatct

SEQ ID NO: 181093 - DNA, 17 bp, Arabidopsis thaliana
tatggtcgaagtaggca

SEQ ID NO: 181094 - DNA, 17 bp, Arabidopsis thaliana
tatggtcgcaaggctga

SEQ ID NO: 181095 - DNA, 17 bp, Arabidopsis thaliana
tatggtgtaccggttgt

SEQ ID NO: 181096 - DNA, 17 bp, Arabidopsis thaliana
tatggttactcctatgg

SEQ ID NO: 181097 - DNA, 17 bp, Arabidopsis thaliana
tatgtatggtcgaagta

SEQ ID NO: 181098 - DNA, 17 bp, Arabidopsis thaliana
tatgtcaaaatattggg

SEQ ID NO: 181099 - DNA, 17 bp, Arabidopsis thaliana
tatgtgcattatggatg

SEQ ID NO: 181100 - DNA, 17 bp, Arabidopsis thaliana
tatgtggaatcattgtg

SEQ ID NO: 181101 - DNA, 17 bp, Arabidopsis thaliana
tatgtgttttctagtgt

SEQ ID NO: 181102 - DNA, 17 bp, Arabidopsis thaliana
tatgttatcttcgatgt

SEQ ID NO: 181103 - DNA, 17 bp, Arabidopsis thaliana
tatgttatgcgtcctat

SEQ ID NO: 181104 - DNA, 17 bp, Arabidopsis thaliana
tatgttcgggccaacga

SEQ ID NO: 181105 - DNA, 17 bp, Arabidopsis thaliana
tatgttgcgaagcttct

SEQ ID NO: 181106 - DNA, 17 bp, Arabidopsis thaliana
tatgtttactaaaacaa

SEQ ID NO: 181107 - DNA, 17 bp, Arabidopsis thaliana
tatgtttcagtcttatc

SEQ ID NO: 181108 - DNA, 17 bp, Arabidopsis thaliana
tatgtttggtctttggt

SEQ ID NO: 181109 - DNA, 17 bp, Arabidopsis thaliana
tattagtaggcccagga

SEQ ID NO: 181110 - DNA, 17 bp, Arabidopsis thaliana
tattagtagtcccagga

SEQ ID NO: 181111 - DNA, 17 bp, Arabidopsis thaliana
tattagtgacgcgcatg

SEQ ID NO: 181112 - DNA, 17 bp, Arabidopsis thaliana
tattagtgagacgctaa

SEQ ID NO: 181113 - DNA, 17 bp, Arabidopsis thaliana
tattagtgagacgctat

SEQ ID NO: 181114 - DNA, 17 bp, Arabidopsis thaliana
tattagtgcaatggtgc

SEQ ID NO: 181115 - DNA, 17 bp, Arabidopsis thaliana
tattagttgatcttgtt

SEQ ID NO: 181116 - DNA, 17 bp, Arabidopsis thaliana
tattattacagcaagta

SEQ ID NO: 181117 - DNA, 17 bp, Arabidopsis thaliana
tattattgagacgctat

SEQ ID NO: 181118 - DNA, 17 bp, Arabidopsis thaliana
tattattgtaacatctg

SEQ ID NO: 181119 - DNA, 17 bp, Arabidopsis thaliana
tattcaacgacagattg

SEQ ID NO: 181120 - DNA, 17 bp, Arabidopsis thaliana
tattcaacgagttcaca

SEQ ID NO: 181121 - DNA, 17 bp, Arabidopsis thaliana
tattcaactacctgatg

SEQ ID NO: 181122 - DNA, 17 bp, Arabidopsis thaliana
tattcaagcatggtctg

SEQ ID NO: 181123 - DNA, 17 bp, Arabidopsis thaliana
tattcaaggacagattg

SEQ ID NO: 181124 - DNA, 17 bp, Arabidopsis thaliana
tattcaaggataacttt

SEQ ID NO: 181125 - DNA, 17 bp, Arabidopsis thaliana
tattcacattgggggct

SEQ ID NO: 181126 - DNA, 17 bp, Arabidopsis thaliana
tattccagatggtagat

SEQ ID NO: 181127 - DNA, 17 bp, Arabidopsis thaliana
tattccaggatatgcaa

SEQ ID NO: 181128 - DNA, 17 bp, Arabidopsis thaliana
tattccaggttgcggtg

SEQ ID NO: 181129 - DNA, 17 bp, Arabidopsis thaliana
tattcgcatcctgtaga

SEQ ID NO: 181130 - DNA, 17 bp, Arabidopsis thaliana
tattcgcgcagggagtc

SEQ ID NO: 181131 - DNA, 17 bp, Arabidopsis thaliana
tattctaggatatgcaa

SEQ ID NO: 181132 - DNA, 17 bp, Arabidopsis thaliana
tattctaggatatgcca

SEQ ID NO: 181133 - DNA, 17 bp, Arabidopsis thaliana
tattctaggatatgcta

SEQ ID NO: 181134 - DNA, 17 bp, Arabidopsis thaliana
tattctaggatatgtaa

SEQ ID NO: 181135 - DNA, 17 bp, Arabidopsis thaliana
tattctggtgtcctagg

SEQ ID NO: 181136 - DNA, 17 bp, Arabidopsis thaliana
tattcttattttgcaag

SEQ ID NO: 181137 - DNA, 17 bp, Arabidopsis thaliana
tattgaacatcgtgtga

SEQ ID NO: 181138 - DNA, 17 bp, Arabidopsis thaliana
tattgagacctatttac

SEQ ID NO: 181139 - DNA, 17 bp, Arabidopsis thaliana
tattgagctgaaaatta

SEQ ID NO: 181140 - DNA, 17 bp, Arabidopsis thaliana
tattgatgtgcggccaa

SEQ ID NO: 181141 - DNA, 17 bp, Arabidopsis thaliana
tattgattcccaagtaa

SEQ ID NO: 181142 - DNA, 17 bp, Arabidopsis thaliana
tattgatttggctttaa

SEQ ID NO: 181143 - DNA, 17 bp, Arabidopsis thaliana
tattggaataccctgga

SEQ ID NO: 181144 - DNA, 17 bp, Arabidopsis thaliana
tattggcctgcttcact

SEQ ID NO: 181145 - DNA, 17 bp, Arabidopsis thaliana
tattggcctggttcact

SEQ ID NO: 181146 - DNA, 17 bp, Arabidopsis thaliana
tattggcctggttcgtt

SEQ ID NO: 181147 - DNA, 17 bp, Arabidopsis thaliana
tattggccttttgcatg

SEQ ID NO: 181148 - DNA, 17 bp, Arabidopsis thaliana
tattggcttctaccgca

SEQ ID NO: 181149 - DNA, 17 bp, Arabidopsis thaliana
tattggttcaattctgg

SEQ ID NO: 181150 - DNA, 17 bp, Arabidopsis thaliana
tattggtttctaccgca

SEQ ID NO: 181151 - DNA, 17 bp, Arabidopsis thaliana
tattgtgattcccttag

SEQ ID NO: 181152 - DNA, 17 bp, Arabidopsis thaliana
tattgttggactaccat

SEQ ID NO: 181153 - DNA, 17 bp, Arabidopsis thaliana
tattgttgtgaccaaca

SEQ ID NO: 181154 - DNA, 17 bp, Arabidopsis thaliana
tatttacttgggtatta

SEQ ID NO: 181155 - DNA, 17 bp, Arabidopsis thaliana
tatttccatcttcgaga

SEQ ID NO: 181156 - DNA, 17 bp, Arabidopsis thaliana
tatttcggctaacaatt

SEQ ID NO: 181157 - DNA, 17 bp, Arabidopsis thaliana
tatttctgccagtttag

SEQ ID NO: 181158 - DNA, 17 bp, Arabidopsis thaliana
tatttgaatggctctac

SEQ ID NO: 181159 - DNA, 17 bp, Arabidopsis thaliana
tatttggaggctgatta

SEQ ID NO: 181160 - DNA, 17 bp, Arabidopsis thaliana
tatttggatgctgctca

SEQ ID NO: 181161 - DNA, 17 bp, Arabidopsis thaliana
tatttgtcagttgccga

SEQ ID NO: 181162 - DNA, 17 bp, Arabidopsis thaliana
tattttctaattttcag

SEQ ID NO: 181163 - DNA, 17 bp, Arabidopsis thaliana
tattttctaattttcta

SEQ ID NO: 181164 - DNA, 17 bp, Arabidopsis thaliana
tattttctcgttttaca

SEQ ID NO: 181165 - DNA, 17 bp, Arabidopsis thaliana
tattttgggtttttgac

SEQ ID NO: 181166 - DNA, 17 bp, Arabidopsis thaliana
tatttttgacttgcggt

SEQ ID NO: 181167 - DNA, 17 bp, Arabidopsis thaliana
tcaaaacagatgctgca

SEQ ID NO: 181168 - DNA, 17 bp, Arabidopsis thaliana
tcaaaactggttcggtc

SEQ ID NO: 181169 - DNA, 17 bp, Arabidopsis thaliana
tcaaaatattgggatgc

SEQ ID NO: 181170 - DNA, 17 bp, Arabidopsis thaliana
tcaaaatcagccaggtt

SEQ ID NO: 181171 - DNA, 17 bp, Arabidopsis thaliana
tcaaaatgattgtcaga

SEQ ID NO: 181172 - DNA, 17 bp, Arabidopsis thaliana
tcaaacatgtgcttggc

SEQ ID NO: 181173 - DNA, 17 bp, Arabidopsis thaliana
tcaaacgaggaaagaat

SEQ ID NO: 181174 - DNA, 17 bp, Arabidopsis thaliana
tcaaacgaggaaaggca

SEQ ID NO: 181175 - DNA, 17 bp, Arabidopsis thaliana
tcaaacgaggaaaggct

SEQ ID NO: 181176 - DNA, 17 bp, Arabidopsis thaliana
tcaaactattcatgtct

SEQ ID NO: 181177 - DNA, 17 bp, Arabidopsis thaliana
tcaaactttgaactaat

SEQ ID NO: 181178 - DNA, 17 bp, Arabidopsis thaliana
tcaaagagattctacga

SEQ ID NO: 181179 - DNA, 17 bp, Arabidopsis thaliana
tcaaagatcgtagcccc

SEQ ID NO: 181180 - DNA, 17 bp, Arabidopsis thaliana
tcaaagcaagcctacga

SEQ ID NO: 181181 - DNA, 17 bp, Arabidopsis thaliana
tcaaagcaagcctacgc

SEQ ID NO: 181182 - DNA, 17 bp, Arabidopsis thaliana
tcaaagccaaaccaata

SEQ ID NO: 181183 - DNA, 17 bp, Arabidopsis thaliana
tcaaagccaaatcaata

SEQ ID NO: 181184 - DNA, 17 bp, Arabidopsis thaliana
tcaaagtatagaaacgc

SEQ ID NO: 181185 - DNA, 17 bp, Arabidopsis thaliana
tcaaagtcagggcagcg

SEQ ID NO: 181186 - DNA, 17 bp, Arabidopsis thaliana
tcaaataattcgggtca

SEQ ID NO: 181187 - DNA, 17 bp, Arabidopsis thaliana
tcaaatcgttcgataac

SEQ ID NO: 181188 - DNA, 17 bp, Arabidopsis thaliana
tcaacacgtcgtctgcg

SEQ ID NO: 181189 - DNA, 17 bp, Arabidopsis thaliana
tcaaccagctgatgcgc

SEQ ID NO: 181190 - DNA, 17 bp, Arabidopsis thaliana
tcaacctagtacgagag

SEQ ID NO: 181191 - DNA, 17 bp, Arabidopsis thaliana
tcaacctttggcctcgg

SEQ ID NO: 181192 - DNA, 17 bp, Arabidopsis thaliana
tcaacctttggtttctc

SEQ ID NO: 181193 - DNA, 17 bp, Arabidopsis thaliana
tcaacgagaacagaaat

SEQ ID NO: 181194 - DNA, 17 bp, Arabidopsis thaliana
tcaacgagttcacacct

SEQ ID NO: 181195 - DNA, 17 bp, Arabidopsis thaliana
tcaacgcgagctgatga

SEQ ID NO: 181196 - DNA, 17 bp, Arabidopsis thaliana
tcaacggaatattgttg

SEQ ID NO: 181197 - DNA, 17 bp, Arabidopsis thaliana
tcaactaaagccactgc

SEQ ID NO: 181198 - DNA, 17 bp, Arabidopsis thaliana
tcaactagccccgaaaa

SEQ ID NO: 181199 - DNA, 17 bp, Arabidopsis thaliana
tcaactccaggattgga

SEQ ID NO: 181200 - DNA, 17 bp, Arabidopsis thaliana
tcaactgaaacttctct

SEQ ID NO: 181201 - DNA, 17 bp, Arabidopsis thaliana
tcaagaaaaggccttaa

SEQ ID NO: 181202 - DNA, 17 bp, Arabidopsis thaliana
tcaagaaaaggccttac

SEQ ID NO: 181203 - DNA, 17 bp, Arabidopsis thaliana
tcaagaacgtgcagagg

SEQ ID NO: 181204 - DNA, 17 bp, Arabidopsis thaliana
tcaagaagctcggcggt

SEQ ID NO: 181205 - DNA, 17 bp, Arabidopsis thaliana
tcaagatccatcttact

SEQ ID NO: 181206 - DNA, 17 bp, Arabidopsis thaliana
tcaagattttgttgtat

SEQ ID NO: 181207 - DNA, 17 bp, Arabidopsis thaliana
tcaagcaccagctcgaa

SEQ ID NO: 181208 - DNA, 17 bp, Arabidopsis thaliana
tcaagcagctcggtagt

SEQ ID NO: 181209 - DNA, 17 bp, Arabidopsis thaliana
tcaaggaacggattttg

SEQ ID NO: 181210 - DNA, 17 bp, Arabidopsis thaliana
tcaaggacagattggag

SEQ ID NO: 181211 - DNA, 17 bp, Arabidopsis thaliana
tcaaggagctgacctag

SEQ ID NO: 181212 - DNA, 17 bp, Arabidopsis thaliana
tcaaggctctgcatctc

SEQ ID NO: 181213 - DNA, 17 bp, Arabidopsis thaliana
tcaagtcgtctaaagaa

SEQ ID NO: 181214 - DNA, 17 bp, Arabidopsis thaliana
tcaatagattgaactat

SEQ ID NO: 181215 - DNA, 17 bp, Arabidopsis thaliana
tcaatagattggactaa

SEQ ID NO: 181216 - DNA, 17 bp, Arabidopsis thaliana
tcaatagattggactat

SEQ ID NO: 181217 - DNA, 17 bp, Arabidopsis thaliana
tcaatcaatgcgctgaa

SEQ ID NO: 181218 - DNA, 17 bp, Arabidopsis thaliana
tcaatgagttgaaagtg

SEQ ID NO: 181219 - DNA, 17 bp, Arabidopsis thaliana
tcaatgcatcgaaagtg

SEQ ID NO: 181220 - DNA, 17 bp, Arabidopsis thaliana
tcaatgcatgaaagtga

SEQ ID NO: 181221 - DNA, 17 bp, Arabidopsis thaliana
tcaatgcattaaaagtg

SEQ ID NO: 181222 - DNA, 17 bp, Arabidopsis thaliana
tcaatgcattgaaaaaa

SEQ ID NO: 181223 - DNA, 17 bp, Arabidopsis thaliana
tcaatgcattgaaagaa

SEQ ID NO: 181224 - DNA, 17 bp, Arabidopsis thaliana
tcaatgcattgaaagta

SEQ ID NO: 181225 - DNA, 17 bp, Arabidopsis thaliana
tcaatgcattgaaagtg

SEQ ID NO: 181226 - DNA, 17 bp, Arabidopsis thaliana
tcaatggacaatgaatc

SEQ ID NO: 181227 - DNA, 17 bp, Arabidopsis thaliana
tcaatggatgagtcaaa

SEQ ID NO: 181228 - DNA, 17 bp, Arabidopsis thaliana
tcaattactcacctcta

SEQ ID NO: 181229 - DNA, 17 bp, Arabidopsis thaliana
tcaatttaactgtagtt

SEQ ID NO: 181230 - DNA, 17 bp, Arabidopsis thaliana
tcaatttccaaaccctt

SEQ ID NO: 181231 - DNA, 17 bp, Arabidopsis thaliana
tcacaaatcgtcgtccc

SEQ ID NO: 181232 - DNA, 17 bp, Arabidopsis thaliana
tcacaagagactttttt

SEQ ID NO: 181233 - DNA, 17 bp, Arabidopsis thaliana
tcacaccttggccgaca

SEQ ID NO: 181234 - DNA, 17 bp, Arabidopsis thaliana
tcacactgatgctgaca

SEQ ID NO: 181235 - DNA, 17 bp, Arabidopsis thaliana
tcacagagagcttgggc

SEQ ID NO: 181236 - DNA, 17 bp, Arabidopsis thaliana
tcacagggagtacccgg

SEQ ID NO: 181237 - DNA, 17 bp, Arabidopsis thaliana
tcacatctagcaaataa

SEQ ID NO: 181238 - DNA, 17 bp, Arabidopsis thaliana
tcaccagatcttttgtc

SEQ ID NO: 181239 - DNA, 17 bp, Arabidopsis thaliana
tcaccatcctttgctga

SEQ ID NO: 181240 - DNA, 17 bp, Arabidopsis thaliana
tcaccatcctttgctgg

SEQ ID NO: 181241 - DNA, 17 bp, Arabidopsis thaliana
tcaccgtggagaccggg

SEQ ID NO: 181242 - DNA, 17 bp, Arabidopsis thaliana
tcacctattttggatgt

SEQ ID NO: 181243 - DNA, 17 bp, Arabidopsis thaliana
tcacctgccgaatgtac

SEQ ID NO: 181244 - DNA, 17 bp, Arabidopsis thaliana
tcacctgtgcaaatatt

SEQ ID NO: 181245 - DNA, 17 bp, Arabidopsis thaliana
tcacgaagtagaacaag

SEQ ID NO: 181246 - DNA, 17 bp, Arabidopsis thaliana
tcacgccaggtcgtact

SEQ ID NO: 181247 - DNA, 17 bp, Arabidopsis thaliana
tcactatatgccactca

SEQ ID NO: 181248 - DNA, 17 bp, Arabidopsis thaliana
tcactatatgccactcg

SEQ ID NO: 181249 - DNA, 17 bp, Arabidopsis thaliana
tcactatgaatgccttt

SEQ ID NO: 181250 - DNA, 17 bp, Arabidopsis thaliana
tcactcgaaccggcgac

SEQ ID NO: 181251 - DNA, 17 bp, Arabidopsis thaliana
tcactctcttctgtcaa

SEQ ID NO: 181252 - DNA, 17 bp, Arabidopsis thaliana
tcactctcttctgtcag

SEQ ID NO: 181253 - DNA, 17 bp, Arabidopsis thaliana
tcactgagactatgatc

SEQ ID NO: 181254 - DNA, 17 bp, Arabidopsis thaliana
tcactgttccctgggat

SEQ ID NO: 181255 - DNA, 17 bp, Arabidopsis thaliana
tcactgttgtgcaagag

SEQ ID NO: 181256 - DNA, 17 bp, Arabidopsis thaliana
tcacttcagggaagacc

SEQ ID NO: 181257 - DNA, 17 bp, Arabidopsis thaliana
tcacttgggttgaccaa

SEQ ID NO: 181258 - DNA, 17 bp, Arabidopsis thaliana
tcacttggtgcaggtcg

SEQ ID NO: 181259 - DNA, 17 bp, Arabidopsis thaliana
tcactttacagtgggac

SEQ ID NO: 181260 - DNA, 17 bp, Arabidopsis thaliana
tcactttgtcgagtcac

SEQ ID NO: 181261 - DNA, 17 bp, Arabidopsis thaliana
tcactttgtttaccagt

SEQ ID NO: 181262 - DNA, 17 bp, Arabidopsis thaliana
tcacttttgtaatttgt

SEQ ID NO: 181263 - DNA, 17 bp, Arabidopsis thaliana
tcagaaaagttaccaca

SEQ ID NO: 181264 - DNA, 17 bp, Arabidopsis thaliana
tcagaaaggcgggcgga

SEQ ID NO: 181265 - DNA, 17 bp, Arabidopsis thaliana
tcagaactggtacggac

SEQ ID NO: 181266 - DNA, 17 bp, Arabidopsis thaliana
tcagaagagcagtaacg

SEQ ID NO: 181267 - DNA, 17 bp, Arabidopsis thaliana
tcagaagcattccttat

SEQ ID NO: 181268 - DNA, 17 bp, Arabidopsis thaliana
tcagacgaggaagtcga

SEQ ID NO: 181269 - DNA, 17 bp, Arabidopsis thaliana
tcagactgtgaaactgc

SEQ ID NO: 181270 - DNA, 17 bp, Arabidopsis thaliana
tcagagactttaccgtt

SEQ ID NO: 181271 - DNA, 17 bp, Arabidopsis thaliana
tcagagatcttggtggt

SEQ ID NO: 181272 - DNA, 17 bp, Arabidopsis thaliana
tcagagatttcaccgta

SEQ ID NO: 181273 - DNA, 17 bp, Arabidopsis thaliana
tcagataccgtcgtagt

SEQ ID NO: 181274 - DNA, 17 bp, Arabidopsis thaliana
tcagataccgtcttgtt

SEQ ID NO: 181275 - DNA, 17 bp, Arabidopsis thaliana
tcagatctaattcacaa

SEQ ID NO: 181276 - DNA, 17 bp, Arabidopsis thaliana
tcagatctggtgaaaaa

SEQ ID NO: 181277 - DNA, 17 bp, Arabidopsis thaliana
tcagattctccggcgtg

SEQ ID NO: 181278 - DNA, 17 bp, Arabidopsis thaliana
tcagcacggagatcata

SEQ ID NO: 181279 - DNA, 17 bp, Arabidopsis thaliana
tcagcaggttttagtcg

SEQ ID NO: 181280 - DNA, 17 bp, Arabidopsis thaliana
tcagccctttgccgcta

SEQ ID NO: 181281 - DNA, 17 bp, Arabidopsis thaliana
tcagccctttgccgctc

SEQ ID NO: 181282 - DNA, 17 bp, Arabidopsis thaliana
tcagccctttgtcgcta

SEQ ID NO: 181283 - DNA, 17 bp, Arabidopsis thaliana
tcagccgcgaaaagcat

SEQ ID NO: 181284 - DNA, 17 bp, Arabidopsis thaliana
tcagcctgctaactagc

SEQ ID NO: 181285 - DNA, 17 bp, Arabidopsis thaliana
tcagcctggaatacaat

SEQ ID NO: 181286 - DNA, 17 bp, Arabidopsis thaliana
tcagcctggtactgggg

SEQ ID NO: 181287 - DNA, 17 bp, Arabidopsis thaliana
tcagcggactgctcgag

SEQ ID NO: 181288 - DNA, 17 bp, Arabidopsis thaliana
tcagcggatgttgctct

SEQ ID NO: 181289 - DNA, 17 bp, Arabidopsis thaliana
tcagcgtattataggta

SEQ ID NO: 181290 - DNA, 17 bp, Arabidopsis thaliana
tcagctcagaactggta

SEQ ID NO: 181291 - DNA, 17 bp, Arabidopsis thaliana
tcagctcgcgttgacta

SEQ ID NO: 181292 - DNA, 17 bp, Arabidopsis thaliana
tcagcttgtgacgtacc

SEQ ID NO: 181293 - DNA, 17 bp, Arabidopsis thaliana
tcaggaccattgcggtt

SEQ ID NO: 181294 - DNA, 17 bp, Arabidopsis thaliana
tcaggagaacatgatcg

SEQ ID NO: 181295 - DNA, 17 bp, Arabidopsis thaliana
tcaggagacccataggc

SEQ ID NO: 181296 - DNA, 17 bp, Arabidopsis thaliana
tcaggagctggcccgca

SEQ ID NO: 181297 - DNA, 17 bp, Arabidopsis thaliana
tcaggaggctgcaggtt

SEQ ID NO: 181298 - DNA, 17 bp, Arabidopsis thaliana
tcaggatgattgtgtga

SEQ ID NO: 181299 - DNA, 17 bp, Arabidopsis thaliana
tcaggatggatagcgga

SEQ ID NO: 181300 - DNA, 17 bp, Arabidopsis thaliana
tcaggcacagctgtgat

SEQ ID NO: 181301 - DNA, 17 bp, Arabidopsis thaliana
tcaggcactgcagcgct

SEQ ID NO: 181302 - DNA, 17 bp, Arabidopsis thaliana
tcaggcatatcctctga

SEQ ID NO: 181303 - DNA, 17 bp, Arabidopsis thaliana
tcaggcatgtttgttgc

SEQ ID NO: 181304 - DNA, 17 bp, Arabidopsis thaliana
tcaggggtaccggctcg

SEQ ID NO: 181305 - DNA, 17 bp, Arabidopsis thaliana
tcaggtatcgtgggtcg

SEQ ID NO: 181306 - DNA, 17 bp, Arabidopsis thaliana
tcaggtggttcttcatt

SEQ ID NO: 181307 - DNA, 17 bp, Arabidopsis thaliana
tcaggttggcaggaatg

SEQ ID NO: 181308 - DNA, 17 bp, Arabidopsis thaliana
tcagtagccgagatgat

SEQ ID NO: 181309 - DNA, 17 bp, Arabidopsis thaliana
tcagtagtcgagaggca

SEQ ID NO: 181310 - DNA, 17 bp, Arabidopsis thaliana
tcagtagttgagaggca

SEQ ID NO: 181311 - DNA, 17 bp, Arabidopsis thaliana
tcagtcgcctgatagcc

SEQ ID NO: 181312 - DNA, 17 bp, Arabidopsis thaliana
tcagtctcggggtggtg

SEQ ID NO: 181313 - DNA, 17 bp, Arabidopsis thaliana
tcagtgaacagattgag

SEQ ID NO: 181314 - DNA, 17 bp, Arabidopsis thaliana
tcagtgacgggtctgta

SEQ ID NO: 181315 - DNA, 17 bp, Arabidopsis thaliana
tcagtggatcgtggcag

SEQ ID NO: 181316 - DNA, 17 bp, Arabidopsis thaliana
tcagtggtttttggaat

SEQ ID NO: 181317 - DNA, 17 bp, Arabidopsis thaliana
tcagttatagtttgttt

SEQ ID NO: 181318 - DNA, 17 bp, Arabidopsis thaliana
tcataagccttgttgac

SEQ ID NO: 181319 - DNA, 17 bp, Arabidopsis thaliana
tcataaggttcgtatta

SEQ ID NO: 181320 - DNA, 17 bp, Arabidopsis thaliana
tcataatccagcgcacg

SEQ ID NO: 181321 - DNA, 17 bp, Arabidopsis thaliana
tcatacaggtgctgcgt

SEQ ID NO: 181322 - DNA, 17 bp, Arabidopsis thaliana
tcatactcattaggtga

SEQ ID NO: 181323 - DNA, 17 bp, Arabidopsis thaliana
tcatactgaccagcaaa

SEQ ID NO: 181324 - DNA, 17 bp, Arabidopsis thaliana
tcatactgcttaccata

SEQ ID NO: 181325 - DNA, 17 bp, Arabidopsis thaliana
tcatagacgacggcagg

SEQ ID NO: 181326 - DNA, 17 bp, Arabidopsis thaliana
tcataggggaacttttt

SEQ ID NO: 181327 - DNA, 17 bp, Arabidopsis thaliana
tcatagtcagaggtgaa

SEQ ID NO: 181328 - DNA, 17 bp, Arabidopsis thaliana
tcatagtctacacaatt

SEQ ID NO: 181329 - DNA, 17 bp, Arabidopsis thaliana
tcatattggctaccgca

SEQ ID NO: 181330 - DNA, 17 bp, Arabidopsis thaliana
tcatattggcttctacc

SEQ ID NO: 181331 - DNA, 17 bp, Arabidopsis thaliana
tcatattgggggctttt

SEQ ID NO: 181332 - DNA, 17 bp, Arabidopsis thaliana
tcatatttggtagccaa

SEQ ID NO: 181333 - DNA, 17 bp, Arabidopsis thaliana
tcatcagcatactgtcg

SEQ ID NO: 181334 - DNA, 17 bp, Arabidopsis thaliana
tcatcagctcgcgttga

SEQ ID NO: 181335 - DNA, 17 bp, Arabidopsis thaliana
tcatcagggtcgagtcc

SEQ ID NO: 181336 - DNA, 17 bp, Arabidopsis thaliana
tcatcatcatctggacg

SEQ ID NO: 181337 - DNA, 17 bp, Arabidopsis thaliana
tcatccgtcgcctcgcc

SEQ ID NO: 181338 - DNA, 17 bp, Arabidopsis thaliana
tcatcctgtagatggat

SEQ ID NO: 181339 - DNA, 17 bp, Arabidopsis thaliana
tcatccttctggttttt

SEQ ID NO: 181340 - DNA, 17 bp, Arabidopsis thaliana
tcatccttgcgcaggga

SEQ ID NO: 181341 - DNA, 17 bp, Arabidopsis thaliana
tcatcggctcaggacca

SEQ ID NO: 181342 - DNA, 17 bp, Arabidopsis thaliana
tcatcgtgatggggata

SEQ ID NO: 181343 - DNA, 17 bp, Arabidopsis thaliana
tcatcttgcaggtaggc

SEQ ID NO: 181344 - DNA, 17 bp, Arabidopsis thaliana
tcatcttttgcccgaag

SEQ ID NO: 181345 - DNA, 17 bp, Arabidopsis thaliana
tcatgataactcgacgg

SEQ ID NO: 181346 - DNA, 17 bp, Arabidopsis thaliana
tcatgcgatctctttgg

SEQ ID NO: 181347 - DNA, 17 bp, Arabidopsis thaliana
tcatgcggtcacacaag

SEQ ID NO: 181348 - DNA, 17 bp, Arabidopsis thaliana
tcatgctatctctttgg

SEQ ID NO: 181349 - DNA, 17 bp, Arabidopsis thaliana
tcatggccgttcttagt

SEQ ID NO: 181350 - DNA, 17 bp, Arabidopsis thaliana
tcatggttagcaaggac

SEQ ID NO: 181351 - DNA, 17 bp, Arabidopsis thaliana
tcatgtgagcagaaaga

SEQ ID NO: 181352 - DNA, 17 bp, Arabidopsis thaliana
tcatgttacttcgctcg

SEQ ID NO: 181353 - DNA, 17 bp, Arabidopsis thaliana
tcattattggaataccc

SEQ ID NO: 181354 - DNA, 17 bp, Arabidopsis thaliana
tcattcaccaatgcgag

SEQ ID NO: 181355 - DNA, 17 bp, Arabidopsis thaliana
tcattcacgatatcttc

SEQ ID NO: 181356 - DNA, 17 bp, Arabidopsis thaliana
tcattcgggggatacga

SEQ ID NO: 181357 - DNA, 17 bp, Arabidopsis thaliana
tcattgtccattgacga

SEQ ID NO: 181358 - DNA, 17 bp, Arabidopsis thaliana
tcattgtcgatacctgt

SEQ ID NO: 181359 - DNA, 17 bp, Arabidopsis thaliana
tcattgtcgataccttt

SEQ ID NO: 181360 - DNA, 17 bp, Arabidopsis thaliana
tcattgtttgtcgttta

SEQ ID NO: 181361 - DNA, 17 bp, Arabidopsis thaliana
tcatttgtatgcttcaa

SEQ ID NO: 181362 - DNA, 17 bp, Arabidopsis thaliana
tcattttcgacggcata

SEQ ID NO: 181363 - DNA, 17 bp, Arabidopsis thaliana
tcattttcgacggcatt

SEQ ID NO: 181364 - DNA, 17 bp, Arabidopsis thaliana
tcattttgatggggggc

SEQ ID NO: 181365 - DNA, 17 bp, Arabidopsis thaliana
tcattttgttatttgga

SEQ ID NO: 181366 - DNA, 17 bp, Arabidopsis thaliana
tcatttttgacggcatt

SEQ ID NO: 181367 - DNA, 17 bp, Arabidopsis thaliana
tccaaaaggatcgcatt

SEQ ID NO: 181368 - DNA, 17 bp, Arabidopsis thaliana
tccaaacgaatgatgat

SEQ ID NO: 181369 - DNA, 17 bp, Arabidopsis thaliana
tccaaagggatcgcata

SEQ ID NO: 181370 - DNA, 17 bp, Arabidopsis thaliana
tccaaagggatcgcatt

SEQ ID NO: 181371 - DNA, 17 bp, Arabidopsis thaliana
tccaaagggatcgcgtt

SEQ ID NO: 181372 - DNA, 17 bp, Arabidopsis thaliana
tccaaagggctcgcatt

SEQ ID NO: 181373 - DNA, 17 bp, Arabidopsis thaliana
tccaaagggtaggacct

SEQ ID NO: 181374 - DNA, 17 bp, Arabidopsis thaliana
tccaaagtatcgcattg

SEQ ID NO: 181375 - DNA, 17 bp, Arabidopsis thaliana
tccaaataacaaaataa

SEQ ID NO: 181376 - DNA, 17 bp, Arabidopsis thaliana
tccaaattcgagataag

SEQ ID NO: 181377 - DNA, 17 bp, Arabidopsis thaliana
tccaaattcgagataga

SEQ ID NO: 181378 - DNA, 17 bp, Arabidopsis thaliana
tccaacaataggctata

SEQ ID NO: 181379 - DNA, 17 bp, Arabidopsis thaliana
tccaaccgaatgatgat

SEQ ID NO: 181380 - DNA, 17 bp, Arabidopsis thaliana
tccaacgtttactatgc

SEQ ID NO: 181381 - DNA, 17 bp, Arabidopsis thaliana
tccaagaagagactaaa

SEQ ID NO: 181382 - DNA, 17 bp, Arabidopsis thaliana
tccaagcgaataatgaa

SEQ ID NO: 181383 - DNA, 17 bp, Arabidopsis thaliana
tccaagcgaatgaggat

SEQ ID NO: 181384 - DNA, 17 bp, Arabidopsis thaliana
tccaagcgaatgatgaa

SEQ ID NO: 181385 - DNA, 17 bp, Arabidopsis thaliana
tccaagcgaatgatgat

SEQ ID NO: 181386 - DNA, 17 bp, Arabidopsis thaliana
tccaagcgaatgatgca

SEQ ID NO: 181387 - DNA, 17 bp, Arabidopsis thaliana
tccaagcgaatgatggt

SEQ ID NO: 181388 - DNA, 17 bp, Arabidopsis thaliana
tccaagcgaatgatgtt

SEQ ID NO: 181389 - DNA, 17 bp, Arabidopsis thaliana
tccaagcgaatgattaa

SEQ ID NO: 181390 - DNA, 17 bp, Arabidopsis thaliana
tccaagcgaatgattga

SEQ ID NO: 181391 - DNA, 17 bp, Arabidopsis thaliana
tccaagcgagtgatgat

SEQ ID NO: 181392 - DNA, 17 bp, Arabidopsis thaliana
tccaagcgatgatgata

SEQ ID NO: 181393 - DNA, 17 bp, Arabidopsis thaliana
tccaagcgattggtgat

SEQ ID NO: 181394 - DNA, 17 bp, Arabidopsis thaliana
tccaagcggatgatgaa

SEQ ID NO: 181395 - DNA, 17 bp, Arabidopsis thaliana
tccaagcggatgatgat

SEQ ID NO: 181396 - DNA, 17 bp, Arabidopsis thaliana
tccaagctgtgttccaa

SEQ ID NO: 181397 - DNA, 17 bp, Arabidopsis thaliana
tccaaggaaggcagcag

SEQ ID NO: 181398 - DNA, 17 bp, Arabidopsis thaliana
tccaaggacgcataccc

SEQ ID NO: 181399 - DNA, 17 bp, Arabidopsis thaliana
tccaagggttcgagctt

SEQ ID NO: 181400 - DNA, 17 bp, Arabidopsis thaliana
tccaagggttctagctt

SEQ ID NO: 181401 - DNA, 17 bp, Arabidopsis thaliana
tccaatctgtccttgaa

SEQ ID NO: 181402 - DNA, 17 bp, Arabidopsis thaliana
tccaatgctggatggta

SEQ ID NO: 181403 - DNA, 17 bp, Arabidopsis thaliana
tccaatgctttttctag

SEQ ID NO: 181404 - DNA, 17 bp, Arabidopsis thaliana
tccaatgtcttttctag

SEQ ID NO: 181405 - DNA, 17 bp, Arabidopsis thaliana
tccacaggctttcttga

SEQ ID NO: 181406 - DNA, 17 bp, Arabidopsis thaliana
tccacatcaacgtgaac

SEQ ID NO: 181407 - DNA, 17 bp, Arabidopsis thaliana
tccactgagattcagcc

SEQ ID NO: 181408 - DNA, 17 bp, Arabidopsis thaliana
tccactgagattcagct

SEQ ID NO: 181409 - DNA, 17 bp, Arabidopsis thaliana
tccagactcaagatcgt

SEQ ID NO: 181410 - DNA, 17 bp, Arabidopsis thaliana
tccagcgacctgggttc

SEQ ID NO: 181411 - DNA, 17 bp, Arabidopsis thaliana
tccaggagagcgagtcg

SEQ ID NO: 181412 - DNA, 17 bp, Arabidopsis thaliana
tccagtaacaaagtata

SEQ ID NO: 181413 - DNA, 17 bp, Arabidopsis thaliana
tccagtcgttaacgaac

SEQ ID NO: 181414 - DNA, 17 bp, Arabidopsis thaliana
tccagtcgttaacgggc

SEQ ID NO: 181415 - DNA, 17 bp, Arabidopsis thaliana
tccagtgggtgcaacag

SEQ ID NO: 181416 - DNA, 17 bp, Arabidopsis thaliana
tccagtttcagctacta

SEQ ID NO: 181417 - DNA, 17 bp, Arabidopsis thaliana
tccatagcgagacccta

SEQ ID NO: 181418 - DNA, 17 bp, Arabidopsis thaliana
tccatcctgagttccat

SEQ ID NO: 181419 - DNA, 17 bp, Arabidopsis thaliana
tccatcgctgtgtcaag

SEQ ID NO: 181420 - DNA, 17 bp, Arabidopsis thaliana
tccattgacgagagaac

SEQ ID NO: 181421 - DNA, 17 bp, Arabidopsis thaliana
tccattgtcgtccagcg

SEQ ID NO: 181422 - DNA, 17 bp, Arabidopsis thaliana
tccatttctaagcttct

SEQ ID NO: 181423 - DNA, 17 bp, Arabidopsis thaliana
tcccaaacgtagacaaa

SEQ ID NO: 181424 - DNA, 17 bp, Arabidopsis thaliana
tcccaaatctagacaaa

SEQ ID NO: 181425 - DNA, 17 bp, Arabidopsis thaliana
tcccaaatgcagacaaa

SEQ ID NO: 181426 - DNA, 17 bp, Arabidopsis thaliana
tcccaaatgtaaacaaa

SEQ ID NO: 181427 - DNA, 17 bp, Arabidopsis thaliana
tcccaaatgtagacaaa

SEQ ID NO: 181428 - DNA, 17 bp, Arabidopsis thaliana
tcccaaatgtagacaca

SEQ ID NO: 181429 - DNA, 17 bp, Arabidopsis thaliana
tcccaaatgtagacaga

SEQ ID NO: 181430 - DNA, 17 bp, Arabidopsis thaliana
tcccaaatgtagacata

SEQ ID NO: 181431 - DNA, 17 bp, Arabidopsis thaliana
tcccaaatgtagacgaa

SEQ ID NO: 181432 - DNA, 17 bp, Arabidopsis thaliana
tcccaaatgtagataaa

SEQ ID NO: 181433 - DNA, 17 bp, Arabidopsis thaliana
tcccaaatgtaggcaaa

SEQ ID NO: 181434 - DNA, 17 bp, Arabidopsis thaliana
tcccaaatgtatacaaa

SEQ ID NO: 181435 - DNA, 17 bp, Arabidopsis thaliana
tcccaaatgtggacaaa

SEQ ID NO: 181436 - DNA, 17 bp, Arabidopsis thaliana
tcccaagtgtagacaaa

SEQ ID NO: 181437 - DNA, 17 bp, Arabidopsis thaliana
tcccacagggttgacca

SEQ ID NO: 181438 - DNA, 17 bp, Arabidopsis thaliana
tcccatataggtattca

SEQ ID NO: 181439 - DNA, 17 bp, Arabidopsis thaliana
tcccatataggtattcg

SEQ ID NO: 181440 - DNA, 17 bp, Arabidopsis thaliana
tcccattccatttcctg

SEQ ID NO: 181441 - DNA, 17 bp, Arabidopsis thaliana
tccccaaaattaaccat

SEQ ID NO: 181442 - DNA, 17 bp, Arabidopsis thaliana
tccccaacggcaacaat

SEQ ID NO: 181443 - DNA, 17 bp, Arabidopsis thaliana
tcccctgcatcaactga

SEQ ID NO: 181444 - DNA, 17 bp, Arabidopsis thaliana
tccccttacaatgtcga

SEQ ID NO: 181445 - DNA, 17 bp, Arabidopsis thaliana
tcccgaacctttgcttg

SEQ ID NO: 181446 - DNA, 17 bp, Arabidopsis thaliana
tcccgaagttgtctctt

SEQ ID NO: 181447 - DNA, 17 bp, Arabidopsis thaliana
tcccgagagagccgttc

SEQ ID NO: 181448 - DNA, 17 bp, Arabidopsis thaliana
tcccgatgaagaagcaa

SEQ ID NO: 181449 - DNA, 17 bp, Arabidopsis thaliana
tcccgccttgcatcaac

SEQ ID NO: 181450 - DNA, 17 bp, Arabidopsis thaliana
tcccgctgggcgggcaa

SEQ ID NO: 181451 - DNA, 17 bp, Arabidopsis thaliana
tcccgtcgagagtcaga

SEQ ID NO: 181452 - DNA, 17 bp, Arabidopsis thaliana
tcccgtcgctgtcatct

SEQ ID NO: 181453 - DNA, 17 bp, Arabidopsis thaliana
tccctcataagttgcct

SEQ ID NO: 181454 - DNA, 17 bp, Arabidopsis thaliana
tccctcctgagctgatc

SEQ ID NO: 181455 - DNA, 17 bp, Arabidopsis thaliana
tccctcctgagcttgat

SEQ ID NO: 181456 - DNA, 17 bp, Arabidopsis thaliana
tccctcctgagcttgtt

SEQ ID NO: 181457 - DNA, 17 bp, Arabidopsis thaliana
tccctgactttgtccgt

SEQ ID NO: 181458 - DNA, 17 bp, Arabidopsis thaliana
tccctgccctttgtaca

SEQ ID NO: 181459 - DNA, 17 bp, Arabidopsis thaliana
tccctgcggatgctaac

SEQ ID NO: 181460 - DNA, 17 bp, Arabidopsis thaliana
tccctgggattggcttt

SEQ ID NO: 181461 - DNA, 17 bp, Arabidopsis thaliana
tccctgtataggccacc

SEQ ID NO: 181462 - DNA, 17 bp, Arabidopsis thaliana
tcccttcaatccaaaca

SEQ ID NO: 181463 - DNA, 17 bp, Arabidopsis thaliana
tcccttcaatccaaaga

SEQ ID NO: 181464 - DNA, 17 bp, Arabidopsis thaliana
tcccttcaatccgaaca

SEQ ID NO: 181465 - DNA, 17 bp, Arabidopsis thaliana
tcccttcaatcctaaca

SEQ ID NO: 181466 - DNA, 17 bp, Arabidopsis thaliana
tcccttcacggccggct

SEQ ID NO: 181467 - DNA, 17 bp, Arabidopsis thaliana
tcccttcagtccaaaga

SEQ ID NO: 181468 - DNA, 17 bp, Arabidopsis thaliana
tcccttcggtcggcgat

SEQ ID NO: 181469 - DNA, 17 bp, Arabidopsis thaliana
tccctttggatgtcgtc

SEQ ID NO: 181470 - DNA, 17 bp, Arabidopsis thaliana
tccctttggatgtcttc

SEQ ID NO: 181471 - DNA, 17 bp, Arabidopsis thaliana
tccgaaaaggctgttag

SEQ ID NO: 181472 - DNA, 17 bp, Arabidopsis thaliana
tccgaacccgggctcag

SEQ ID NO: 181473 - DNA, 17 bp, Arabidopsis thaliana
tccgaacgacgcttccg

SEQ ID NO: 181474 - DNA, 17 bp, Arabidopsis thaliana
tccgacaaaagatctgg

SEQ ID NO: 181475 - DNA, 17 bp, Arabidopsis thaliana
tccgaccaggcttcatt

SEQ ID NO: 181476 - DNA, 17 bp, Arabidopsis thaliana
tccgagacttcatcgac

SEQ ID NO: 181477 - DNA, 17 bp, Arabidopsis thaliana
tccgagcgaatgatgat

SEQ ID NO: 181478 - DNA, 17 bp, Arabidopsis thaliana
tccgatgcgaacaatca

SEQ ID NO: 181479 - DNA, 17 bp, Arabidopsis thaliana
tccgatgtagtctagct

SEQ ID NO: 181480 - DNA, 17 bp, Arabidopsis thaliana
tccgatgtcgtccagat

SEQ ID NO: 181481 - DNA, 17 bp, Arabidopsis thaliana
tccgatgtcgtccagca

SEQ ID NO: 181482 - DNA, 17 bp, Arabidopsis thaliana
tccgatgtcgtccagcg

SEQ ID NO: 181483 - DNA, 17 bp, Arabidopsis thaliana
tccgatgtcgtccatcc

SEQ ID NO: 181484 - DNA, 17 bp, Arabidopsis thaliana
tccgattcctaccaaaa

SEQ ID NO: 181485 - DNA, 17 bp, Arabidopsis thaliana
tccgattgatacaggga

SEQ ID NO: 181486 - DNA, 17 bp, Arabidopsis thaliana
tccgcagttaagcgcgc

SEQ ID NO: 181487 - DNA, 17 bp, Arabidopsis thaliana
tccgcagttaagcgtgc

SEQ ID NO: 181488 - DNA, 17 bp, Arabidopsis thaliana
tccgccctttgtcgcta

SEQ ID NO: 181489 - DNA, 17 bp, Arabidopsis thaliana
tccgccgatcgattcgg

SEQ ID NO: 181490 - DNA, 17 bp, Arabidopsis thaliana
tccgcggcgagagcggg

SEQ ID NO: 181491 - DNA, 17 bp, Arabidopsis thaliana
tccgctaaggagtgtgt

SEQ ID NO: 181492 - DNA, 17 bp, Arabidopsis thaliana
tccgctgacagccgacc

SEQ ID NO: 181493 - DNA, 17 bp, Arabidopsis thaliana
tccgctgacagccgacg

SEQ ID NO: 181494 - DNA, 17 bp, Arabidopsis thaliana
tccgctggcaccttatg

SEQ ID NO: 181495 - DNA, 17 bp, Arabidopsis thaliana
tccgcttgcagagagaa

SEQ ID NO: 181496 - DNA, 17 bp, Arabidopsis thaliana
tccgcttgttcatttta

SEQ ID NO: 181497 - DNA, 17 bp, Arabidopsis thaliana
tccggaaccgggacgtg

SEQ ID NO: 181498 - DNA, 17 bp, Arabidopsis thaliana
tccggaatcgaaccgat

SEQ ID NO: 181499 - DNA, 17 bp, Arabidopsis thaliana
tccggaatcgagatcca

SEQ ID NO: 181500 - DNA, 17 bp, Arabidopsis thaliana
tccggaccaggcttcat

SEQ ID NO: 181501 - DNA, 17 bp, Arabidopsis thaliana
tccggagacgtcggcgg

SEQ ID NO: 181502 - DNA, 17 bp, Arabidopsis thaliana
tccggcggaccaggttg

SEQ ID NO: 181503 - DNA, 17 bp, Arabidopsis thaliana
tccggggcctgtgtttc

SEQ ID NO: 181504 - DNA, 17 bp, Arabidopsis thaliana
tccggtgaagtgttcgg

SEQ ID NO: 181505 - DNA, 17 bp, Arabidopsis thaliana
tccggtggtctcggact

SEQ ID NO: 181506 - DNA, 17 bp, Arabidopsis thaliana
tccggttccgggcattt

SEQ ID NO: 181507 - DNA, 17 bp, Arabidopsis thaliana
tccgtaatttgtgagat

SEQ ID NO: 181508 - DNA, 17 bp, Arabidopsis thaliana
tccgtcgggaaatagat

SEQ ID NO: 181509 - DNA, 17 bp, Arabidopsis thaliana
tccgttaacgaacgaga

SEQ ID NO: 181510 - DNA, 17 bp, Arabidopsis thaliana
tccgttatcgtccagcg

SEQ ID NO: 181511 - DNA, 17 bp, Arabidopsis thaliana
tccgttatgacccgaaa

SEQ ID NO: 181512 - DNA, 17 bp, Arabidopsis thaliana
tccgttcggcggaagcg

SEQ ID NO: 181513 - DNA, 17 bp, Arabidopsis thaliana
tccgttcggtggaagcg

SEQ ID NO: 181514 - DNA, 17 bp, Arabidopsis thaliana
tccgttgtctgttcgac

SEQ ID NO: 181515 - DNA, 17 bp, Arabidopsis thaliana
tccgtttttcaaatttc

SEQ ID NO: 181516 - DNA, 17 bp, Arabidopsis thaliana
tcctaaatgtagacaaa

SEQ ID NO: 181517 - DNA, 17 bp, Arabidopsis thaliana
tcctaaccaaactaacc

SEQ ID NO: 181518 - DNA, 17 bp, Arabidopsis thaliana
tcctaccgattgaatga

SEQ ID NO: 181519 - DNA, 17 bp, Arabidopsis thaliana
tcctatcattgtgaagc

SEQ ID NO: 181520 - DNA, 17 bp, Arabidopsis thaliana
tcctcaccatcctttgc

SEQ ID NO: 181521 - DNA, 17 bp, Arabidopsis thaliana
tcctcagttcgggcctg

SEQ ID NO: 181522 - DNA, 17 bp, Arabidopsis thaliana
tcctcatattggcttct

SEQ ID NO: 181523 - DNA, 17 bp, Arabidopsis thaliana
tcctccaggtctgtgac

SEQ ID NO: 181524 - DNA, 17 bp, Arabidopsis thaliana
tcctccgaagtgtggaa

SEQ ID NO: 181525 - DNA, 17 bp, Arabidopsis thaliana
tcctcctgatctgactc

SEQ ID NO: 181526 - DNA, 17 bp, Arabidopsis thaliana
tcctcgaccaaggatgg

SEQ ID NO: 181527 - DNA, 17 bp, Arabidopsis thaliana
tcctcggcagtctgcgt

SEQ ID NO: 181528 - DNA, 17 bp, Arabidopsis thaliana
tcctcggtttgctcaaa

SEQ ID NO: 181529 - DNA, 17 bp, Arabidopsis thaliana
tcctcgtcgtcgtcttc

SEQ ID NO: 181530 - DNA, 17 bp, Arabidopsis thaliana
tcctcgtctgcggattc

SEQ ID NO: 181531 - DNA, 17 bp, Arabidopsis thaliana
tcctcgtggatgtcgtc

SEQ ID NO: 181532 - DNA, 17 bp, Arabidopsis thaliana
tcctcgtgttgcaattc

SEQ ID NO: 181533 - DNA, 17 bp, Arabidopsis thaliana
tcctctgcctttgatga

SEQ ID NO: 181534 - DNA, 17 bp, Arabidopsis thaliana
tcctcttacaatgtcga

SEQ ID NO: 181535 - DNA, 17 bp, Arabidopsis thaliana
tcctctttgtttaccag

SEQ ID NO: 181536 - DNA, 17 bp, Arabidopsis thaliana
tcctgaatcttccgaca

SEQ ID NO: 181537 - DNA, 17 bp, Arabidopsis thaliana
tcctgaattttccgaca

SEQ ID NO: 181538 - DNA, 17 bp, Arabidopsis thaliana
tcctgaattttccgagg

SEQ ID NO: 181539 - DNA, 17 bp, Arabidopsis thaliana
tcctgacgtggctgtta

SEQ ID NO: 181540 - DNA, 17 bp, Arabidopsis thaliana
tcctgagctgatccatc

SEQ ID NO: 181541 - DNA, 17 bp, Arabidopsis thaliana
tcctgagcttgatacat

SEQ ID NO: 181542 - DNA, 17 bp, Arabidopsis thaliana
tcctgagcttgatccat

SEQ ID NO: 181543 - DNA, 17 bp, Arabidopsis thaliana
tcctgagcttgattcat

SEQ ID NO: 181544 - DNA, 17 bp, Arabidopsis thaliana
tcctgatctgactcata

SEQ ID NO: 181545 - DNA, 17 bp, Arabidopsis thaliana
tcctgcgcaaggatgac

SEQ ID NO: 181546 - DNA, 17 bp, Arabidopsis thaliana
tcctgcgcctggatgtg

SEQ ID NO: 181547 - DNA, 17 bp, Arabidopsis thaliana
tcctgcgtgggcgaata

SEQ ID NO: 181548 - DNA, 17 bp, Arabidopsis thaliana
tcctgggtgctcagaaa

SEQ ID NO: 181549 - DNA, 17 bp, Arabidopsis thaliana
tcctgtagatggatcat

SEQ ID NO: 181550 - DNA, 17 bp, Arabidopsis thaliana
tcctgtgacatcggcgt

SEQ ID NO: 181551 - DNA, 17 bp, Arabidopsis thaliana
tcctgtttgcggtagtc

SEQ ID NO: 181552 - DNA, 17 bp, Arabidopsis thaliana
tccttacaatctcaaga

SEQ ID NO: 181553 - DNA, 17 bp, Arabidopsis thaliana
tccttagtcgcatcctg

SEQ ID NO: 181554 - DNA, 17 bp, Arabidopsis thaliana
tccttcaggtctgtgac

SEQ ID NO: 181555 - DNA, 17 bp, Arabidopsis thaliana
tccttcgatgtcggctc

SEQ ID NO: 181556 - DNA, 17 bp, Arabidopsis thaliana
tccttcgcgggcggacc

SEQ ID NO: 181557 - DNA, 17 bp, Arabidopsis thaliana
tccttcggtgaaagata

SEQ ID NO: 181558 - DNA, 17 bp, Arabidopsis thaliana
tccttcggtgaaagatt

SEQ ID NO: 181559 - DNA, 17 bp, Arabidopsis thaliana
tccttctggtttttgct

SEQ ID NO: 181560 - DNA, 17 bp, Arabidopsis thaliana
tccttcttctgtcaaga

SEQ ID NO: 181561 - DNA, 17 bp, Arabidopsis thaliana
tccttgactcgctttcg

SEQ ID NO: 181562 - DNA, 17 bp, Arabidopsis thaliana
tcctttgctgatgcggg

SEQ ID NO: 181563 - DNA, 17 bp, Arabidopsis thaliana
tcctttggtttccattt

SEQ ID NO: 181564 - DNA, 17 bp, Arabidopsis thaliana
tccttttgggaaacccg

SEQ ID NO: 181565 - DNA, 17 bp, Arabidopsis thaliana
tcgaaaaactgaatcca

SEQ ID NO: 181566 - DNA, 17 bp, Arabidopsis thaliana
tcgaaaaactgaatccc

SEQ ID NO: 181567 - DNA, 17 bp, Arabidopsis thaliana
tcgaaatcgaatacctg

SEQ ID NO: 181568 - DNA, 17 bp, Arabidopsis thaliana
tcgaaatctacgattca

SEQ ID NO: 181569 - DNA, 17 bp, Arabidopsis thaliana
tcgaaatctacgattta

SEQ ID NO: 181570 - DNA, 17 bp, Arabidopsis thaliana
tcgaacacctacaagga

SEQ ID NO: 181571 - DNA, 17 bp, Arabidopsis thaliana
tcgaaccatctagtagc

SEQ ID NO: 181572 - DNA, 17 bp, Arabidopsis thaliana
tcgaacccgggctcaga

SEQ ID NO: 181573 - DNA, 17 bp, Arabidopsis thaliana
tcgaacccttggagagt

SEQ ID NO: 181574 - DNA, 17 bp, Arabidopsis thaliana
tcgaactcatcttggta

SEQ ID NO: 181575 - DNA, 17 bp, Arabidopsis thaliana
tcgaactcatcttggtg

SEQ ID NO: 181576 - DNA, 17 bp, Arabidopsis thaliana
tcgaactcatctttggt

SEQ ID NO: 181577 - DNA, 17 bp, Arabidopsis thaliana
tcgaagacgatcagata

SEQ ID NO: 181578 - DNA, 17 bp, Arabidopsis thaliana
tcgaagccgggccggca

SEQ ID NO: 181579 - DNA, 17 bp, Arabidopsis thaliana
tcgaagccgggtcggca

SEQ ID NO: 181580 - DNA, 17 bp, Arabidopsis thaliana
tcgaatcctcggacccg

SEQ ID NO: 181581 - DNA, 17 bp, Arabidopsis thaliana
tcgaatgggagcaagaa

SEQ ID NO: 181582 - DNA, 17 bp, Arabidopsis thaliana
tcgaatttggaatattt

SEQ ID NO: 181583 - DNA, 17 bp, Arabidopsis thaliana
tcgacaaccatacaaaa

SEQ ID NO: 181584 - DNA, 17 bp, Arabidopsis thaliana
tcgacaagccaggcgag

SEQ ID NO: 181585 - DNA, 17 bp, Arabidopsis thaliana
tcgacactggacttggt

SEQ ID NO: 181586 - DNA, 17 bp, Arabidopsis thaliana
tcgacagcctgctatcc

SEQ ID NO: 181587 - DNA, 17 bp, Arabidopsis thaliana
tcgacatggtcggggtc

SEQ ID NO: 181588 - DNA, 17 bp, Arabidopsis thaliana
tcgaccaaggatgggcc

SEQ ID NO: 181589 - DNA, 17 bp, Arabidopsis thaliana
tcgaccaggcttcattc

SEQ ID NO: 181590 - DNA, 17 bp, Arabidopsis thaliana
tcgaccaggcttcattt

SEQ ID NO: 181591 - DNA, 17 bp, Arabidopsis thaliana
tcgaccgacgcggatta

SEQ ID NO: 181592 - DNA, 17 bp, Arabidopsis thaliana
tcgacgacgtgtttggt

SEQ ID NO: 181593 - DNA, 17 bp, Arabidopsis thaliana
tcgacgcggattacgga

SEQ ID NO: 181594 - DNA, 17 bp, Arabidopsis thaliana
tcgacgcggattacggt

SEQ ID NO: 181595 - DNA, 17 bp, Arabidopsis thaliana
tcgacggcattacggta

SEQ ID NO: 181596 - DNA, 17 bp, Arabidopsis thaliana
tcgactccgatatcggc

SEQ ID NO: 181597 - DNA, 17 bp, Arabidopsis thaliana
tcgacttcccctggggg

SEQ ID NO: 181598 - DNA, 17 bp, Arabidopsis thaliana
tcgagaaccaaaccggc

SEQ ID NO: 181599 - DNA, 17 bp, Arabidopsis thaliana
tcgagaacgaggttcct

SEQ ID NO: 181600 - DNA, 17 bp, Arabidopsis thaliana
tcgagaagcagggcacg

SEQ ID NO: 181601 - DNA, 17 bp, Arabidopsis thaliana
tcgagaatcgtccatgg

SEQ ID NO: 181602 - DNA, 17 bp, Arabidopsis thaliana
tcgagataagcagtgta

SEQ ID NO: 181603 - DNA, 17 bp, Arabidopsis thaliana
tcgagatccctcccaaa

SEQ ID NO: 181604 - DNA, 17 bp, Arabidopsis thaliana
tcgaggatctcttcgac

SEQ ID NO: 181605 - DNA, 17 bp, Arabidopsis thaliana
tcgagtcacatgggtcc

SEQ ID NO: 181606 - DNA, 17 bp, Arabidopsis thaliana
tcgagtcccaccgggtg

SEQ ID NO: 181607 - DNA, 17 bp, Arabidopsis thaliana
tcgataaacctcagcat

SEQ ID NO: 181608 - DNA, 17 bp, Arabidopsis thaliana
tcgataaacctctgcat

SEQ ID NO: 181609 - DNA, 17 bp, Arabidopsis thaliana
tcgataaacctctgcgt

SEQ ID NO: 181610 - DNA, 17 bp, Arabidopsis thaliana
tcgataaatttctgcat

SEQ ID NO: 181611 - DNA, 17 bp, Arabidopsis thaliana
tcgatagttggtgacga

SEQ ID NO: 181612 - DNA, 17 bp, Arabidopsis thaliana
tcgatcaccgtctgccg

SEQ ID NO: 181613 - DNA, 17 bp, Arabidopsis thaliana
tcgatcctattgtgttg

SEQ ID NO: 181614 - DNA, 17 bp, Arabidopsis thaliana
tcgatcctgggtgcggg

SEQ ID NO: 181615 - DNA, 17 bp, Arabidopsis thaliana
tcgatctcattgggccg

SEQ ID NO: 181616 - DNA, 17 bp, Arabidopsis thaliana
tcgatcttccaactccc

SEQ ID NO: 181617 - DNA, 17 bp, Arabidopsis thaliana
tcgatgaagaacgtagc

SEQ ID NO: 181618 - DNA, 17 bp, Arabidopsis thaliana
tcgatgatgagttccgg

SEQ ID NO: 181619 - DNA, 17 bp, Arabidopsis thaliana
tcgatgcgcgagcatgg

SEQ ID NO: 181620 - DNA, 17 bp, Arabidopsis thaliana
tcgatggaacaatgtag

SEQ ID NO: 181621 - DNA, 17 bp, Arabidopsis thaliana
tcgatgggactcttcta

SEQ ID NO: 181622 - DNA, 17 bp, Arabidopsis thaliana
tcgatgggtgagaactg

SEQ ID NO: 181623 - DNA, 17 bp, Arabidopsis thaliana
tcgatgtcggctcttcc

SEQ ID NO: 181624 - DNA, 17 bp, Arabidopsis thaliana
tcgatgttcaatagata

SEQ ID NO: 181625 - DNA, 17 bp, Arabidopsis thaliana
tcgattaagacagcagg

SEQ ID NO: 181626 - DNA, 17 bp, Arabidopsis thaliana
tcgattaagcggggctg

SEQ ID NO: 181627 - DNA, 17 bp, Arabidopsis thaliana
tcgattccgatagccgg

SEQ ID NO: 181628 - DNA, 17 bp, Arabidopsis thaliana
tcgattccggcaggtcg

SEQ ID NO: 181629 - DNA, 17 bp, Arabidopsis thaliana
tcgattcggggcgtgga

SEQ ID NO: 181630 - DNA, 17 bp, Arabidopsis thaliana
tcgattgctgtcagagc

SEQ ID NO: 181631 - DNA, 17 bp, Arabidopsis thaliana
tcgcaacctgtagatgg

SEQ ID NO: 181632 - DNA, 17 bp, Arabidopsis thaliana
tcgcaaggctgaaacca

SEQ ID NO: 181633 - DNA, 17 bp, Arabidopsis thaliana
tcgcaccaggcttcatt

SEQ ID NO: 181634 - DNA, 17 bp, Arabidopsis thaliana
tcgcacggcggtctgac

SEQ ID NO: 181635 - DNA, 17 bp, Arabidopsis thaliana
tcgcactgtagatggat

SEQ ID NO: 181636 - DNA, 17 bp, Arabidopsis thaliana
tcgcagatctcaaacaa

SEQ ID NO: 181637 - DNA, 17 bp, Arabidopsis thaliana
tcgcagcggttctgacg

SEQ ID NO: 181638 - DNA, 17 bp, Arabidopsis thaliana
tcgcaggagagatagca

SEQ ID NO: 181639 - DNA, 17 bp, Arabidopsis thaliana
tcgcaggagagatagcg

SEQ ID NO: 181640 - DNA, 17 bp, Arabidopsis thaliana
tcgcaggcgctattcca

SEQ ID NO: 181641 - DNA, 17 bp, Arabidopsis thaliana
tcgcagtggcgccaaat

SEQ ID NO: 181642 - DNA, 17 bp, Arabidopsis thaliana
tcgcagtttttgagaga

SEQ ID NO: 181643 - DNA, 17 bp, Arabidopsis thaliana
tcgcagtttttgagagg

SEQ ID NO: 181644 - DNA, 17 bp, Arabidopsis thaliana
tcgcatcctatagatgg

SEQ ID NO: 181645 - DNA, 17 bp, Arabidopsis thaliana
tcgcatcctgtagatag

SEQ ID NO: 181646 - DNA, 17 bp, Arabidopsis thaliana
tcgcatcctgtagatca

SEQ ID NO: 181647 - DNA, 17 bp, Arabidopsis thaliana
tcgcatcctgtagatga

SEQ ID NO: 181648 - DNA, 17 bp, Arabidopsis thaliana
tcgcatcctgtagatgg

SEQ ID NO: 181649 - DNA, 17 bp, Arabidopsis thaliana
tcgcatctgtagatgga

SEQ ID NO: 181650 - DNA, 17 bp, Arabidopsis thaliana
tcgcattcggccaatca

SEQ ID NO: 181651 - DNA, 17 bp, Arabidopsis thaliana
tcgcattctgtagatgg

SEQ ID NO: 181652 - DNA, 17 bp, Arabidopsis thaliana
tcgcatttcactgggcc

SEQ ID NO: 181653 - DNA, 17 bp, Arabidopsis thaliana
tcgccaaactgccatcc

SEQ ID NO: 181654 - DNA, 17 bp, Arabidopsis thaliana
tcgccaaggatgacttg

SEQ ID NO: 181655 - DNA, 17 bp, Arabidopsis thaliana
tcgccagcacagaggcc

SEQ ID NO: 181656 - DNA, 17 bp, Arabidopsis thaliana
tcgcccgtcgctcctcc

SEQ ID NO: 181657 - DNA, 17 bp, Arabidopsis thaliana
tcgccctggggagtagg

SEQ ID NO: 181658 - DNA, 17 bp, Arabidopsis thaliana
tcgccgaccgaagggac

SEQ ID NO: 181659 - DNA, 17 bp, Arabidopsis thaliana
tcgccgcccgcgacgtc

SEQ ID NO: 181660 - DNA, 17 bp, Arabidopsis thaliana
tcgccgctgaaatctgg

SEQ ID NO: 181661 - DNA, 17 bp, Arabidopsis thaliana
tcgccgtattgtgacaa

SEQ ID NO: 181662 - DNA, 17 bp, Arabidopsis thaliana
tcgcctagacgaggcca

SEQ ID NO: 181663 - DNA, 17 bp, Arabidopsis thaliana
tcgcctggtgcaggtcg

SEQ ID NO: 181664 - DNA, 17 bp, Arabidopsis thaliana
tcgcctgtagcccagtc

SEQ ID NO: 181665 - DNA, 17 bp, Arabidopsis thaliana
tcgcgaaagcccagata

SEQ ID NO: 181666 - DNA, 17 bp, Arabidopsis thaliana
tcgcgaaagcgtccagc

SEQ ID NO: 181667 - DNA, 17 bp, Arabidopsis thaliana
tcgcgacgtcgcgggcg

SEQ ID NO: 181668 - DNA, 17 bp, Arabidopsis thaliana
tcgcgagaagtccacca

SEQ ID NO: 181669 - DNA, 17 bp, Arabidopsis thaliana
tcgcgatagtaattcaa

SEQ ID NO: 181670 - DNA, 17 bp, Arabidopsis thaliana
tcgcgatcccgcgaggg

SEQ ID NO: 181671 - DNA, 17 bp, Arabidopsis thaliana
tcgcgattcttccccaa

SEQ ID NO: 181672 - DNA, 17 bp, Arabidopsis thaliana
tcgcgcggcggtctgac

SEQ ID NO: 181673 - DNA, 17 bp, Arabidopsis thaliana
tcgcgctgtagatggat

SEQ ID NO: 181674 - DNA, 17 bp, Arabidopsis thaliana
tcgcgcttggttgaaaa

SEQ ID NO: 181675 - DNA, 17 bp, Arabidopsis thaliana
tcgcgcttgtacggctt

SEQ ID NO: 181676 - DNA, 17 bp, Arabidopsis thaliana
tcgcggagggacggcgg

SEQ ID NO: 181677 - DNA, 17 bp, Arabidopsis thaliana
tcgcggatgagagccgt

SEQ ID NO: 181678 - DNA, 17 bp, Arabidopsis thaliana
tcgcggcaacgcaacta

SEQ ID NO: 181679 - DNA, 17 bp, Arabidopsis thaliana
tcgcggcgacgtgggtg

SEQ ID NO: 181680 - DNA, 17 bp, Arabidopsis thaliana
tcgcgggcggacccggg

SEQ ID NO: 181681 - DNA, 17 bp, Arabidopsis thaliana
tcgcgggcggcgaacca

SEQ ID NO: 181682 - DNA, 17 bp, Arabidopsis thaliana
tcgcgtacgtgaggcga

SEQ ID NO: 181683 - DNA, 17 bp, Arabidopsis thaliana
tcgcgtgggtctagccg

SEQ ID NO: 181684 - DNA, 17 bp, Arabidopsis thaliana
tcgcgttgactacatcc

SEQ ID NO: 181685 - DNA, 17 bp, Arabidopsis thaliana
tcgctcaaagtatagaa

SEQ ID NO: 181686 - DNA, 17 bp, Arabidopsis thaliana
tcgctcgcagtcgtgac

SEQ ID NO: 181687 - DNA, 17 bp, Arabidopsis thaliana
tcgctctgataccaaat

SEQ ID NO: 181688 - DNA, 17 bp, Arabidopsis thaliana
tcgctgaaagcagagaa

SEQ ID NO: 181689 - DNA, 17 bp, Arabidopsis thaliana
tcgctgaattttattct

SEQ ID NO: 181690 - DNA, 17 bp, Arabidopsis thaliana
tcgctgcaaaacctagg

SEQ ID NO: 181691 - DNA, 17 bp, Arabidopsis thaliana
tcgctgccgtgatcggg

SEQ ID NO: 181692 - DNA, 17 bp, Arabidopsis thaliana
tcgcttagtgcaggtcg

SEQ ID NO: 181693 - DNA, 17 bp, Arabidopsis thaliana
tcgcttcgtaagcgaaa

SEQ ID NO: 181694 - DNA, 17 bp, Arabidopsis thaliana
tcgcttcgtgcaggtcg

SEQ ID NO: 181695 - DNA, 17 bp, Arabidopsis thaliana
tcgcttgatgcaggtcg

SEQ ID NO: 181696 - DNA, 17 bp, Arabidopsis thaliana
tcgcttgcagagagaaa

SEQ ID NO: 181697 - DNA, 17 bp, Arabidopsis thaliana
tcgcttgctgcaggtcg

SEQ ID NO: 181698 - DNA, 17 bp, Arabidopsis thaliana
tcgcttggagcaggtcg

SEQ ID NO: 181699 - DNA, 17 bp, Arabidopsis thaliana
tcgcttggtgcaagtcg

SEQ ID NO: 181700 - DNA, 17 bp, Arabidopsis thaliana
tcgcttggtgcagatcg

SEQ ID NO: 181701 - DNA, 17 bp, Arabidopsis thaliana
tcgcttggtgcaggacg

SEQ ID NO: 181702 - DNA, 17 bp, Arabidopsis thaliana
tcgcttggtgcaggcag

SEQ ID NO: 181703 - DNA, 17 bp, Arabidopsis thaliana
tcgcttggtgcaggtca

SEQ ID NO: 181704 - DNA, 17 bp, Arabidopsis thaliana
tcgcttggtgcaggtcg

SEQ ID NO: 181705 - DNA, 17 bp, Arabidopsis thaliana
tcgcttggtgcaggtct

SEQ ID NO: 181706 - DNA, 17 bp, Arabidopsis thaliana
tcgcttggtgcagtcgg

SEQ ID NO: 181707 - DNA, 17 bp, Arabidopsis thaliana
tcgcttggtgcagttcg

SEQ ID NO: 181708 - DNA, 17 bp, Arabidopsis thaliana
tcgcttggtgcatgtcg

SEQ ID NO: 181709 - DNA, 17 bp, Arabidopsis thaliana
tcgcttggtgtaggtcg

SEQ ID NO: 181710 - DNA, 17 bp, Arabidopsis thaliana
tcgcttgttgcaggtcg

SEQ ID NO: 181711 - DNA, 17 bp, Arabidopsis thaliana
tcgctttgactacgtcc

SEQ ID NO: 181712 - DNA, 17 bp, Arabidopsis thaliana
tcgctttgaggtcattt

SEQ ID NO: 181713 - DNA, 17 bp, Arabidopsis thaliana
tcggaaaattcaggaga

SEQ ID NO: 181714 - DNA, 17 bp, Arabidopsis thaliana
tcggaaacaggtttttg

SEQ ID NO: 181715 - DNA, 17 bp, Arabidopsis thaliana
tcggaaatcagagattc

SEQ ID NO: 181716 - DNA, 17 bp, Arabidopsis thaliana
tcggaagattcaggata

SEQ ID NO: 181717 - DNA, 17 bp, Arabidopsis thaliana
tcggaccaggcttcata

SEQ ID NO: 181718 - DNA, 17 bp, Arabidopsis thaliana
tcggaccaggcttcatc

SEQ ID NO: 181719 - DNA, 17 bp, Arabidopsis thaliana
tcggaccaggcttcatt

SEQ ID NO: 181720 - DNA, 17 bp, Arabidopsis thaliana
tcggaccaggcttcctc

SEQ ID NO: 181721 - DNA, 17 bp, Arabidopsis thaliana
tcggaccaggcttcctt

SEQ ID NO: 181722 - DNA, 17 bp, Arabidopsis thaliana
tcggaccaggttcattc

SEQ ID NO: 181723 - DNA, 17 bp, Arabidopsis thaliana
tcggaccaggtttcatc

SEQ ID NO: 181724 - DNA, 17 bp, Arabidopsis thaliana
tcggaccaggtttcatt

SEQ ID NO: 181725 - DNA, 17 bp, Arabidopsis thaliana
tcggacccggtcgacga

SEQ ID NO: 181726 - DNA, 17 bp, Arabidopsis thaliana
tcggacccggtcgatga

SEQ ID NO: 181727 - DNA, 17 bp, Arabidopsis thaliana
tcggaccggatcgggta

SEQ ID NO: 181728 - DNA, 17 bp, Arabidopsis thaliana
tcggacctggcttcatt

SEQ ID NO: 181729 - DNA, 17 bp, Arabidopsis thaliana
tcggacgttctgccatc

SEQ ID NO: 181730 - DNA, 17 bp, Arabidopsis thaliana
tcggactaggcttcatc

SEQ ID NO: 181731 - DNA, 17 bp, Arabidopsis thaliana
tcggactgaagggagct

SEQ ID NO: 181732 - DNA, 17 bp, Arabidopsis thaliana
tcggacttgtgggagtt

SEQ ID NO: 181733 - DNA, 17 bp, Arabidopsis thaliana
tcggagactgcagagat

SEQ ID NO: 181734 - DNA, 17 bp, Arabidopsis thaliana
tcggagatgaacggcca

SEQ ID NO: 181735 - DNA, 17 bp, Arabidopsis thaliana
tcggagggtatgtgaag

SEQ ID NO: 181736 - DNA, 17 bp, Arabidopsis thaliana
tcggatagccagtgttc

SEQ ID NO: 181737 - DNA, 17 bp, Arabidopsis thaliana
tcggatatggtgtagtg

SEQ ID NO: 181738 - DNA, 17 bp, Arabidopsis thaliana
tcggatcaggcttcctc

SEQ ID NO: 181739 - DNA, 17 bp, Arabidopsis thaliana
tcggatcgattaaattt

SEQ ID NO: 181740 - DNA, 17 bp, Arabidopsis thaliana
tcggatgcggaaaagtt

SEQ ID NO: 181741 - DNA, 17 bp, Arabidopsis thaliana
tcggattaggcttcatt

SEQ ID NO: 181742 - DNA, 17 bp, Arabidopsis thaliana
tcggattgcagcttaca

SEQ ID NO: 181743 - DNA, 17 bp, Arabidopsis thaliana
tcggcaacggatatctc

SEQ ID NO: 181744 - DNA, 17 bp, Arabidopsis thaliana
tcggcaagatggccgag

SEQ ID NO: 181745 - DNA, 17 bp, Arabidopsis thaliana
tcggcaagctcaggagc

SEQ ID NO: 181746 - DNA, 17 bp, Arabidopsis thaliana
tcggcagatgaagaccc

SEQ ID NO: 181747 - DNA, 17 bp, Arabidopsis thaliana
tcggcagcgacgtctcc

SEQ ID NO: 181748 - DNA, 17 bp, Arabidopsis thaliana
tcggcagtgctgacggc

SEQ ID NO: 181749 - DNA, 17 bp, Arabidopsis thaliana
tcggcatgataactgga

SEQ ID NO: 181750 - DNA, 17 bp, Arabidopsis thaliana
tcggccaggcttcattc

SEQ ID NO: 181751 - DNA, 17 bp, Arabidopsis thaliana
tcggccggaccgccttt

SEQ ID NO: 181752 - DNA, 17 bp, Arabidopsis thaliana
tcggccggtccgccttt

SEQ ID NO: 181753 - DNA, 17 bp, Arabidopsis thaliana
tcggccggtccgttttg

SEQ ID NO: 181754 - DNA, 17 bp, Arabidopsis thaliana
tcggccggtttgccttt

SEQ ID NO: 181755 - DNA, 17 bp, Arabidopsis thaliana
tcggccgttcgtaccaa

SEQ ID NO: 181756 - DNA, 17 bp, Arabidopsis thaliana
tcggcctgcatacaggg

SEQ ID NO: 181757 - DNA, 17 bp, Arabidopsis thaliana
tcggcctggggtgaaaa

SEQ ID NO: 181758 - DNA, 17 bp, Arabidopsis thaliana
tcggcctttctatcgga

SEQ ID NO: 181759 - DNA, 17 bp, Arabidopsis thaliana
tcggcgatacgctcctg

SEQ ID NO: 181760 - DNA, 17 bp, Arabidopsis thaliana
tcggcgggggcctcggg

SEQ ID NO: 181761 - DNA, 17 bp, Arabidopsis thaliana
tcggcgggtcgatccgg

SEQ ID NO: 181762 - DNA, 17 bp, Arabidopsis thaliana
tcggcgtatgagtggtg

SEQ ID NO: 181763 - DNA, 17 bp, Arabidopsis thaliana
tcggctcacccgcggga

SEQ ID NO: 181764 - DNA, 17 bp, Arabidopsis thaliana
tcggctcaggaccattg

SEQ ID NO: 181765 - DNA, 17 bp, Arabidopsis thaliana
tcggcttgtcccttcgg

SEQ ID NO: 181766 - DNA, 17 bp, Arabidopsis thaliana
tcggcttgtgcaaccgg

SEQ ID NO: 181767 - DNA, 17 bp, Arabidopsis thaliana
tcggctttccgacggat

SEQ ID NO: 181768 - DNA, 17 bp, Arabidopsis thaliana
tcgggaaaaggattggc

SEQ ID NO: 181769 - DNA, 17 bp, Arabidopsis thaliana
tcgggagggaagcggat

SEQ ID NO: 181770 - DNA, 17 bp, Arabidopsis thaliana
tcgggcacggtcgatga

SEQ ID NO: 181771 - DNA, 17 bp, Arabidopsis thaliana
tcgggcggcgggctcat

SEQ ID NO: 181772 - DNA, 17 bp, Arabidopsis thaliana
tcgggcttgtcggcggt

SEQ ID NO: 181773 - DNA, 17 bp, Arabidopsis thaliana
tcggggcctctttcgaa

SEQ ID NO: 181774 - DNA, 17 bp, Arabidopsis thaliana
tcgggggatcttagaaa

SEQ ID NO: 181775 - DNA, 17 bp, Arabidopsis thaliana
tcgggtatgcgcgttct

SEQ ID NO: 181776 - DNA, 17 bp, Arabidopsis thaliana
tcgggtcataacggagg

SEQ ID NO: 181777 - DNA, 17 bp, Arabidopsis thaliana
tcgggttgcaattcggt

SEQ ID NO: 181778 - DNA, 17 bp, Arabidopsis thaliana
tcggtagatcttagaaa

SEQ ID NO: 181779 - DNA, 17 bp, Arabidopsis thaliana
tcggtaggagcgacggg

SEQ ID NO: 181780 - DNA, 17 bp, Arabidopsis thaliana
tcggtatctaaccattc

SEQ ID NO: 181781 - DNA, 17 bp, Arabidopsis thaliana
tcggtccctgtataggc

SEQ ID NO: 181782 - DNA, 17 bp, Arabidopsis thaliana
tcggtcggtttagaaat

SEQ ID NO: 181783 - DNA, 17 bp, Arabidopsis thaliana
tcggtctcaggcacagc

SEQ ID NO: 181784 - DNA, 17 bp, Arabidopsis thaliana
tcggtcttgtcgtgcgc

SEQ ID NO: 181785 - DNA, 17 bp, Arabidopsis thaliana
tcggtgaacctgcggaa

SEQ ID NO: 181786 - DNA, 17 bp, Arabidopsis thaliana
tcggtggatcttagaaa

SEQ ID NO: 181787 - DNA, 17 bp, Arabidopsis thaliana
tcggtgggccggtttct

SEQ ID NO: 181788 - DNA, 17 bp, Arabidopsis thaliana
tcgtaacctggctctga

SEQ ID NO: 181789 - DNA, 17 bp, Arabidopsis thaliana
tcgtacaatttctcagc

SEQ ID NO: 181790 - DNA, 17 bp, Arabidopsis thaliana
tcgtaccaagcggcata

SEQ ID NO: 181791 - DNA, 17 bp, Arabidopsis thaliana
tcgtaccaggcttcatt

SEQ ID NO: 181792 - DNA, 17 bp, Arabidopsis thaliana
tcgtacccgggcgaagc

SEQ ID NO: 181793 - DNA, 17 bp, Arabidopsis thaliana
tcgtacgagacctttgc

SEQ ID NO: 181794 - DNA, 17 bp, Arabidopsis thaliana
tcgtactaagtagagtc

SEQ ID NO: 181795 - DNA, 17 bp, Arabidopsis thaliana
tcgtactcataaccgca

SEQ ID NO: 181796 - DNA, 17 bp, Arabidopsis thaliana
tcgtacttgcgcgatgt

SEQ ID NO: 181797 - DNA, 17 bp, Arabidopsis thaliana
tcgtagacatctggaca

SEQ ID NO: 181798 - DNA, 17 bp, Arabidopsis thaliana
tcgtagacatctggacc

SEQ ID NO: 181799 - DNA, 17 bp, Arabidopsis thaliana
tcgtagtcgcatcctgt

SEQ ID NO: 181800 - DNA, 17 bp, Arabidopsis thaliana
tcgtagtcgccattccc

SEQ ID NO: 181801 - DNA, 17 bp, Arabidopsis thaliana
tcgtagttgaaccttgg

SEQ ID NO: 181802 - DNA, 17 bp, Arabidopsis thaliana
tcgtagtttggcgacct

SEQ ID NO: 181803 - DNA, 17 bp, Arabidopsis thaliana
tcgtatccggcgtctag

SEQ ID NO: 181804 - DNA, 17 bp, Arabidopsis thaliana
tcgtatccggttgggct

SEQ ID NO: 181805 - DNA, 17 bp, Arabidopsis thaliana
tcgtatctcagcaggca

SEQ ID NO: 181806 - DNA, 17 bp, Arabidopsis thaliana
tcgtatctctcaggtgt

SEQ ID NO: 181807 - DNA, 17 bp, Arabidopsis thaliana
tcgtcaatggacaatga

SEQ ID NO: 181808 - DNA, 17 bp, Arabidopsis thaliana
tcgtccatggtcctgca

SEQ ID NO: 181809 - DNA, 17 bp, Arabidopsis thaliana
tcgtccgaatagtcgcg

SEQ ID NO: 181810 - DNA, 17 bp, Arabidopsis thaliana
tcgtcctggagatggat

SEQ ID NO: 181811 - DNA, 17 bp, Arabidopsis thaliana
tcgtcggaccaggcttc

SEQ ID NO: 181812 - DNA, 17 bp, Arabidopsis thaliana
tcgtcggattcggaaaa

SEQ ID NO: 181813 - DNA, 17 bp, Arabidopsis thaliana
tcgtcgtacaatttctc

SEQ ID NO: 181814 - DNA, 17 bp, Arabidopsis thaliana
tcgtctcggtttgcgat

SEQ ID NO: 181815 - DNA, 17 bp, Arabidopsis thaliana
tcgtctcgttacagtta

SEQ ID NO: 181816 - DNA, 17 bp, Arabidopsis thaliana
tcgtctgacttgggtat

SEQ ID NO: 181817 - DNA, 17 bp, Arabidopsis thaliana
tcgtctgtagtccaacg

SEQ ID NO: 181818 - DNA, 17 bp, Arabidopsis thaliana
tcgtcttcttgatcgcg

SEQ ID NO: 181819 - DNA, 17 bp, Arabidopsis thaliana
tcgtcttgtgttgctca

SEQ ID NO: 181820 - DNA, 17 bp, Arabidopsis thaliana
tcgtctttccactaagc

SEQ ID NO: 181821 - DNA, 17 bp, Arabidopsis thaliana
tcgtctttggcatctgc

SEQ ID NO: 181822 - DNA, 17 bp, Arabidopsis thaliana
tcgtgagacaggttagt

SEQ ID NO: 181823 - DNA, 17 bp, Arabidopsis thaliana
tcgtgcgtgctcgagaa

SEQ ID NO: 181824 - DNA, 17 bp, Arabidopsis thaliana
tcgtgctaaagagcgtg

SEQ ID NO: 181825 - DNA, 17 bp, Arabidopsis thaliana
tcgtggattcgaggagg

SEQ ID NO: 181826 - DNA, 17 bp, Arabidopsis thaliana
tcgtggtctgcagcacg

SEQ ID NO: 181827 - DNA, 17 bp, Arabidopsis thaliana
tcgtgtggcggcaggga

SEQ ID NO: 181828 - DNA, 17 bp, Arabidopsis thaliana
tcgttcccagctggacc

SEQ ID NO: 181829 - DNA, 17 bp, Arabidopsis thaliana
tcgttccccagcagagt

SEQ ID NO: 181830 - DNA, 17 bp, Arabidopsis thaliana
tcgttcctcgccggggg

SEQ ID NO: 181831 - DNA, 17 bp, Arabidopsis thaliana
tcgttcgtctgacttgg

SEQ ID NO: 181832 - DNA, 17 bp, Arabidopsis thaliana
tcgttgctcagaatacc

SEQ ID NO: 181833 - DNA, 17 bp, Arabidopsis thaliana
tcgttggctaagtccgt

SEQ ID NO: 181834 - DNA, 17 bp, Arabidopsis thaliana
tcgttgtctgtctgtct

SEQ ID NO: 181835 - DNA, 17 bp, Arabidopsis thaliana
tcgtttccggcaggtcg

SEQ ID NO: 181836 - DNA, 17 bp, Arabidopsis thaliana
tcgtttctcggaacgcc

SEQ ID NO: 181837 - DNA, 17 bp, Arabidopsis thaliana
tcgtttgattctgattt

SEQ ID NO: 181838 - DNA, 17 bp, Arabidopsis thaliana
tctaagaatttggaatt

SEQ ID NO: 181839 - DNA, 17 bp, Arabidopsis thaliana
tctaagacttctattga

SEQ ID NO: 181840 - DNA, 17 bp, Arabidopsis thaliana
tctaagagcagtactga

SEQ ID NO: 181841 - DNA, 17 bp, Arabidopsis thaliana
tctaagtcagaatccgg

SEQ ID NO: 181842 - DNA, 17 bp, Arabidopsis thaliana
tctaagtccaacatagc

SEQ ID NO: 181843 - DNA, 17 bp, Arabidopsis thaliana
tctaagtcgcatcctgt

SEQ ID NO: 181844 - DNA, 17 bp, Arabidopsis thaliana
tctaagtcttctattca

SEQ ID NO: 181845 - DNA, 17 bp, Arabidopsis thaliana
tctaagtcttctattga

SEQ ID NO: 181846 - DNA, 17 bp, Arabidopsis thaliana
tctaatagaaactgaaa

SEQ ID NO: 181847 - DNA, 17 bp, Arabidopsis thaliana
tctaatagaaactgaat

SEQ ID NO: 181848 - DNA, 17 bp, Arabidopsis thaliana
tctaattcctttggttt

SEQ ID NO: 181849 - DNA, 17 bp, Arabidopsis thaliana
tctacagatgcgactaa

SEQ ID NO: 181850 - DNA, 17 bp, Arabidopsis thaliana
tctacaggatgcgacta

SEQ ID NO: 181851 - DNA, 17 bp, Arabidopsis thaliana
tctacaggatgcgactg

SEQ ID NO: 181852 - DNA, 17 bp, Arabidopsis thaliana
tctacaggatgcgatca

SEQ ID NO: 181853 - DNA, 17 bp, Arabidopsis thaliana
tctacaggatgcgatcc

SEQ ID NO: 181854 - DNA, 17 bp, Arabidopsis thaliana
tctacaggatgcggatc

SEQ ID NO: 181855 - DNA, 17 bp, Arabidopsis thaliana
tctacatgaagcaagtc

SEQ ID NO: 181856 - DNA, 17 bp, Arabidopsis thaliana
tctaccacattcatcta

SEQ ID NO: 181857 - DNA, 17 bp, Arabidopsis thaliana
tctaccatccgatcaac

SEQ ID NO: 181858 - DNA, 17 bp, Arabidopsis thaliana
tctaccatctggaatac

SEQ ID NO: 181859 - DNA, 17 bp, Arabidopsis thaliana
tctaccgcaagagttgc

SEQ ID NO: 181860 - DNA, 17 bp, Arabidopsis thaliana
tctacctgattcatacc

SEQ ID NO: 181861 - DNA, 17 bp, Arabidopsis thaliana
tctacgtgcttagttcg

SEQ ID NO: 181862 - DNA, 17 bp, Arabidopsis thaliana
tctactatcctgggcct

SEQ ID NO: 181863 - DNA, 17 bp, Arabidopsis thaliana
tctacttcggtgacgat

SEQ ID NO: 181864 - DNA, 17 bp, Arabidopsis thaliana
tctacttcgtgctattg

SEQ ID NO: 181865 - DNA, 17 bp, Arabidopsis thaliana
tctagaaactgattcct

SEQ ID NO: 181866 - DNA, 17 bp, Arabidopsis thaliana
tctagatgtgcgaggca

SEQ ID NO: 181867 - DNA, 17 bp, Arabidopsis thaliana
tctagatgtgcgaggtg

SEQ ID NO: 181868 - DNA, 17 bp, Arabidopsis thaliana
tctagattttcgataca

SEQ ID NO: 181869 - DNA, 17 bp, Arabidopsis thaliana
tctagcagctgttgagc

SEQ ID NO: 181870 - DNA, 17 bp, Arabidopsis thaliana
tctaggcctccgttatg

SEQ ID NO: 181871 - DNA, 17 bp, Arabidopsis thaliana
tctagggctttgtcatc

SEQ ID NO: 181872 - DNA, 17 bp, Arabidopsis thaliana
tctagtgggtcgtattc

SEQ ID NO: 181873 - DNA, 17 bp, Arabidopsis thaliana
tctatccgggcggagga

SEQ ID NO: 181874 - DNA, 17 bp, Arabidopsis thaliana
tctatgactgtgctgta

SEQ ID NO: 181875 - DNA, 17 bp, Arabidopsis thaliana
tctattcgaaactagtt

SEQ ID NO: 181876 - DNA, 17 bp, Arabidopsis thaliana
tctatttgtgagttgcg

SEQ ID NO: 181877 - DNA, 17 bp, Arabidopsis thaliana
tctcaaaatgattgtca

SEQ ID NO: 181878 - DNA, 17 bp, Arabidopsis thaliana
tctcaaagaggattggt

SEQ ID NO: 181879 - DNA, 17 bp, Arabidopsis thaliana
tctcaaagattaagcca

SEQ ID NO: 181880 - DNA, 17 bp, Arabidopsis thaliana
tctcaacctggctctca

SEQ ID NO: 181881 - DNA, 17 bp, Arabidopsis thaliana
tctcaacctggctctga

SEQ ID NO: 181882 - DNA, 17 bp, Arabidopsis thaliana
tctcaactgttaccaga

SEQ ID NO: 181883 - DNA, 17 bp, Arabidopsis thaliana
tctcaaggctgtgggtt

SEQ ID NO: 181884 - DNA, 17 bp, Arabidopsis thaliana
tctcaattccaatcgac

SEQ ID NO: 181885 - DNA, 17 bp, Arabidopsis thaliana
tctcacctgtgcaaata

SEQ ID NO: 181886 - DNA, 17 bp, Arabidopsis thaliana
tctcacgccaggtcgta

SEQ ID NO: 181887 - DNA, 17 bp, Arabidopsis thaliana
tctcactaaacggtttt

SEQ ID NO: 181888 - DNA, 17 bp, Arabidopsis thaliana
tctcactaataaagact

SEQ ID NO: 181889 - DNA, 17 bp, Arabidopsis thaliana
tctcactgccttggtca

SEQ ID NO: 181890 - DNA, 17 bp, Arabidopsis thaliana
tctcagatctccgagaa

SEQ ID NO: 181891 - DNA, 17 bp, Arabidopsis thaliana
tctcagattgacttgaa

SEQ ID NO: 181892 - DNA, 17 bp, Arabidopsis thaliana
tctcagcagtggacgga

SEQ ID NO: 181893 - DNA, 17 bp, Arabidopsis thaliana
tctcagcctctacaagc

SEQ ID NO: 181894 - DNA, 17 bp, Arabidopsis thaliana
tctcaggatcatacata

SEQ ID NO: 181895 - DNA, 17 bp, Arabidopsis thaliana
tctcaggcacagctgtg

SEQ ID NO: 181896 - DNA, 17 bp, Arabidopsis thaliana
tctcatggagagttcga

SEQ ID NO: 181897 - DNA, 17 bp, Arabidopsis thaliana
tctcatgtttctctaca

SEQ ID NO: 181898 - DNA, 17 bp, Arabidopsis thaliana
tctcatttacttgaaca

SEQ ID NO: 181899 - DNA, 17 bp, Arabidopsis thaliana
tctccaaggagcttatc

SEQ ID NO: 181900 - DNA, 17 bp, Arabidopsis thaliana
tctccacccggttgctg

SEQ ID NO: 181901 - DNA, 17 bp, Arabidopsis thaliana
tctccagcaggattcct

SEQ ID NO: 181902 - DNA, 17 bp, Arabidopsis thaliana
tctcccggtaggacctc

SEQ ID NO: 181903 - DNA, 17 bp, Arabidopsis thaliana
tctccctggaggtcgac

SEQ ID NO: 181904 - DNA, 17 bp, Arabidopsis thaliana
tctccctgtagatggat

SEQ ID NO: 181905 - DNA, 17 bp, Arabidopsis thaliana
tctccgaccgagtctaa

SEQ ID NO: 181906 - DNA, 17 bp, Arabidopsis thaliana
tctccgaggtgtagcga

SEQ ID NO: 181907 - DNA, 17 bp, Arabidopsis thaliana
tctccggtcgattcatc

SEQ ID NO: 181908 - DNA, 17 bp, Arabidopsis thaliana
tctcctcggcagtctgc

SEQ ID NO: 181909 - DNA, 17 bp, Arabidopsis thaliana
tctcctcggcagtttgc

SEQ ID NO: 181910 - DNA, 17 bp, Arabidopsis thaliana
tctcctgaggttccatc

SEQ ID NO: 181911 - DNA, 17 bp, Arabidopsis thaliana
tctcctgggcagcacca

SEQ ID NO: 181912 - DNA, 17 bp, Arabidopsis thaliana
tctcctgggtgctcaga

SEQ ID NO: 181913 - DNA, 17 bp, Arabidopsis thaliana
tctccttcttctgtcaa

SEQ ID NO: 181914 - DNA, 17 bp, Arabidopsis thaliana
tctcctttatcatcgcc

SEQ ID NO: 181915 - DNA, 17 bp, Arabidopsis thaliana
tctcgaggagaagggcc

SEQ ID NO: 181916 - DNA, 17 bp, Arabidopsis thaliana
tctcgatgaagagccga

SEQ ID NO: 181917 - DNA, 17 bp, Arabidopsis thaliana
tctcgatgaagagccgt

SEQ ID NO: 181918 - DNA, 17 bp, Arabidopsis thaliana
tctcgcagccggttctt

SEQ ID NO: 181919 - DNA, 17 bp, Arabidopsis thaliana
tctcggaagagctccag

SEQ ID NO: 181920 - DNA, 17 bp, Arabidopsis thaliana
tctcggacttgtgggag

SEQ ID NO: 181921 - DNA, 17 bp, Arabidopsis thaliana
tctcggatgcggaaaag

SEQ ID NO: 181922 - DNA, 17 bp, Arabidopsis thaliana
tctcggccttttggcta

SEQ ID NO: 181923 - DNA, 17 bp, Arabidopsis thaliana
tctcggctctcgcatcg

SEQ ID NO: 181924 - DNA, 17 bp, Arabidopsis thaliana
tctcggctttcagatta

SEQ ID NO: 181925 - DNA, 17 bp, Arabidopsis thaliana
tctcggtgggccggttt

SEQ ID NO: 181926 - DNA, 17 bp, Arabidopsis thaliana
tctcggttcgcaatcca

SEQ ID NO: 181927 - DNA, 17 bp, Arabidopsis thaliana
tctcggttcgcgatcca

SEQ ID NO: 181928 - DNA, 17 bp, Arabidopsis thaliana
tctcggttgatgtttaa

SEQ ID NO: 181929 - DNA, 17 bp, Arabidopsis thaliana
tctcgtagctcagttgg

SEQ ID NO: 181930 - DNA, 17 bp, Arabidopsis thaliana
tctcgtagttgtatggg

SEQ ID NO: 181931 - DNA, 17 bp, Arabidopsis thaliana
tctcgtcaaaggggcta

SEQ ID NO: 181932 - DNA, 17 bp, Arabidopsis thaliana
tctcgtcaagcaaacaa

SEQ ID NO: 181933 - DNA, 17 bp, Arabidopsis thaliana
tctcgtcaatggacaag

SEQ ID NO: 181934 - DNA, 17 bp, Arabidopsis thaliana
tctcgtcaatggacaat

SEQ ID NO: 181935 - DNA, 17 bp, Arabidopsis thaliana
tctcgtcgtagtttggc

SEQ ID NO: 181936 - DNA, 17 bp, Arabidopsis thaliana
tctcgtggttgtatggg

SEQ ID NO: 181937 - DNA, 17 bp, Arabidopsis thaliana
tctcgtgttcattgatc

SEQ ID NO: 181938 - DNA, 17 bp, Arabidopsis thaliana
tctcgttgagagttgaa

SEQ ID NO: 181939 - DNA, 17 bp, Arabidopsis thaliana
tctcgttgtctgttcga

SEQ ID NO: 181940 - DNA, 17 bp, Arabidopsis thaliana
tctcgtttaatggatga

SEQ ID NO: 181941 - DNA, 17 bp, Arabidopsis thaliana
tctcgtttatcaggttg

SEQ ID NO: 181942 - DNA, 17 bp, Arabidopsis thaliana
tctcgttttacagattc

SEQ ID NO: 181943 - DNA, 17 bp, Arabidopsis thaliana
tctcgttttgggtaaca

SEQ ID NO: 181944 - DNA, 17 bp, Arabidopsis thaliana
tctctaaggatcaacca

SEQ ID NO: 181945 - DNA, 17 bp, Arabidopsis thaliana
tctctaaggatttagct

SEQ ID NO: 181946 - DNA, 17 bp, Arabidopsis thaliana
tctctacctctaattcg

SEQ ID NO: 181947 - DNA, 17 bp, Arabidopsis thaliana
tctctacgctatgttgg

SEQ ID NO: 181948 - DNA, 17 bp, Arabidopsis thaliana
tctctacgttaagccgt

SEQ ID NO: 181949 - DNA, 17 bp, Arabidopsis thaliana
tctctagggttgaattt

SEQ ID NO: 181950 - DNA, 17 bp, Arabidopsis thaliana
tctctatcttctgtcaa

SEQ ID NO: 181951 - DNA, 17 bp, Arabidopsis thaliana
tctctatcttctgtcag

SEQ ID NO: 181952 - DNA, 17 bp, Arabidopsis thaliana
tctctatgttctgtcaa

SEQ ID NO: 181953 - DNA, 17 bp, Arabidopsis thaliana
tctctcctggaccacca

SEQ ID NO: 181954 - DNA, 17 bp, Arabidopsis thaliana
tctctcgggatccaata

SEQ ID NO: 181955 - DNA, 17 bp, Arabidopsis thaliana
tctctcggtctagcggc

SEQ ID NO: 181956 - DNA, 17 bp, Arabidopsis thaliana
tctctctcggtctttct

SEQ ID NO: 181957 - DNA, 17 bp, Arabidopsis thaliana
tctctctcttttgtcga

SEQ ID NO: 181958 - DNA, 17 bp, Arabidopsis thaliana
tctctctgacttgatgt

SEQ ID NO: 181959 - DNA, 17 bp, Arabidopsis thaliana
tctctctgcaagcgaag

SEQ ID NO: 181960 - DNA, 17 bp, Arabidopsis thaliana
tctctctgttgtgaagt

SEQ ID NO: 181961 - DNA, 17 bp, Arabidopsis thaliana
tctctgcaaatatagac

SEQ ID NO: 181962 - DNA, 17 bp, Arabidopsis thaliana
tctctgcaagcgaagat

SEQ ID NO: 181963 - DNA, 17 bp, Arabidopsis thaliana
tctctgcagtctccgat

SEQ ID NO: 181964 - DNA, 17 bp, Arabidopsis thaliana
tctcttaaggtagccaa

SEQ ID NO: 181965 - DNA, 17 bp, Arabidopsis thaliana
tctcttagctaagagac

SEQ ID NO: 181966 - DNA, 17 bp, Arabidopsis thaliana
tctcttctgtcagatcc

SEQ ID NO: 181967 - DNA, 17 bp, Arabidopsis thaliana
tctcttggtgcaggtcg

SEQ ID NO: 181968 - DNA, 17 bp, Arabidopsis thaliana
tctcttgtgaattaatt

SEQ ID NO: 181969 - DNA, 17 bp, Arabidopsis thaliana
tctctttccatgaagaa

SEQ ID NO: 181970 - DNA, 17 bp, Arabidopsis thaliana
tctctttctaaacgttt

SEQ ID NO: 181971 - DNA, 17 bp, Arabidopsis thaliana
tctctttcttctgtcaa

SEQ ID NO: 181972 - DNA, 17 bp, Arabidopsis thaliana
tctctttcttctgtcag

SEQ ID NO: 181973 - DNA, 17 bp, Arabidopsis thaliana
tctctttcttctgtcga

SEQ ID NO: 181974 - DNA, 17 bp, Arabidopsis thaliana
tctctttgtggtgatga

SEQ ID NO: 181975 - DNA, 17 bp, Arabidopsis thaliana
tctctttttcgataaat

SEQ ID NO: 181976 - DNA, 17 bp, Arabidopsis thaliana
tctgaagctctgttgtg

SEQ ID NO: 181977 - DNA, 17 bp, Arabidopsis thaliana
tctgaatctctgaagtt

SEQ ID NO: 181978 - DNA, 17 bp, Arabidopsis thaliana
tctgacacctgcccggt

SEQ ID NO: 181979 - DNA, 17 bp, Arabidopsis thaliana
tctgacatgtgtgcgag

SEQ ID NO: 181980 - DNA, 17 bp, Arabidopsis thaliana
tctgaccaggtttcatt

SEQ ID NO: 181981 - DNA, 17 bp, Arabidopsis thaliana
tctgagcattcaacaac

SEQ ID NO: 181982 - DNA, 17 bp, Arabidopsis thaliana
tctgagggctgggctcg

SEQ ID NO: 181983 - DNA, 17 bp, Arabidopsis thaliana
tctgatccgaacttgag

SEQ ID NO: 181984 - DNA, 17 bp, Arabidopsis thaliana
tctgatcgccaactgca

SEQ ID NO: 181985 - DNA, 17 bp, Arabidopsis thaliana
tctgatggtgcaaggta

SEQ ID NO: 181986 - DNA, 17 bp, Arabidopsis thaliana
tctgatgttctcttacc

SEQ ID NO: 181987 - DNA, 17 bp, Arabidopsis thaliana
tctgattatgctggaat

SEQ ID NO: 181988 - DNA, 17 bp, Arabidopsis thaliana
tctgcaaacgccttgga

SEQ ID NO: 181989 - DNA, 17 bp, Arabidopsis thaliana
tctgcaacaggatcact

SEQ ID NO: 181990 - DNA, 17 bp, Arabidopsis thaliana
tctgcaagcgaagatcc

SEQ ID NO: 181991 - DNA, 17 bp, Arabidopsis thaliana
tctgcagttcttcttct

SEQ ID NO: 181992 - DNA, 17 bp, Arabidopsis thaliana
tctgcatctgtgtttgt

SEQ ID NO: 181993 - DNA, 17 bp, Arabidopsis thaliana
tctgcccagtgctctga

SEQ ID NO: 181994 - DNA, 17 bp, Arabidopsis thaliana
tctgccctccgaccgtc

SEQ ID NO: 181995 - DNA, 17 bp, Arabidopsis thaliana
tctgcctattaactctc

SEQ ID NO: 181996 - DNA, 17 bp, Arabidopsis thaliana
tctgcctgggtgtcaca

SEQ ID NO: 181997 - DNA, 17 bp, Arabidopsis thaliana
tctgcggttaaagcgtt

SEQ ID NO: 181998 - DNA, 17 bp, Arabidopsis thaliana
tctgctaacattgacgg

SEQ ID NO: 181999 - DNA, 17 bp, Arabidopsis thaliana
tctgctaactagctacg

SEQ ID NO: 182000 - DNA, 17 bp, Arabidopsis thaliana
tctgctaggcggactac

SEQ ID NO: 182001 - DNA, 17 bp, Arabidopsis thaliana
tctgctatgttgctgct

SEQ ID NO: 182002 - DNA, 17 bp, Arabidopsis thaliana
tctgctgcgctcctgat

SEQ ID NO: 182003 - DNA, 17 bp, Arabidopsis thaliana
tctgcttagtggaaaga

SEQ ID NO: 182004 - DNA, 17 bp, Arabidopsis thaliana
tctgcttggaccggatc

SEQ ID NO: 182005 - DNA, 17 bp, Arabidopsis thaliana
tctggcggttgagggtt

SEQ ID NO: 182006 - DNA, 17 bp, Arabidopsis thaliana
tctggctttcacccagg

SEQ ID NO: 182007 - DNA, 17 bp, Arabidopsis thaliana
tctgggggctgggagaa

SEQ ID NO: 182008 - DNA, 17 bp, Arabidopsis thaliana
tctggtcaatggccttt

SEQ ID NO: 182009 - DNA, 17 bp, Arabidopsis thaliana
tctggtgatagccgaaa

SEQ ID NO: 182010 - DNA, 17 bp, Arabidopsis thaliana
tctggtgttgagatagt

SEQ ID NO: 182011 - DNA, 17 bp, Arabidopsis thaliana
tctggttcgatggctgt

SEQ ID NO: 182012 - DNA, 17 bp, Arabidopsis thaliana
tctggtttttgctgcaa

SEQ ID NO: 182013 - DNA, 17 bp, Arabidopsis thaliana
tctgtaaaacgagaaaa

SEQ ID NO: 182014 - DNA, 17 bp, Arabidopsis thaliana
tctgtaacgcccgttaa

SEQ ID NO: 182015 - DNA, 17 bp, Arabidopsis thaliana
tctgtaatcttgaggtc

SEQ ID NO: 182016 - DNA, 17 bp, Arabidopsis thaliana
tctgtaatcttgagttc

SEQ ID NO: 182017 - DNA, 17 bp, Arabidopsis thaliana
tctgtctctactgttgt

SEQ ID NO: 182018 - DNA, 17 bp, Arabidopsis thaliana
tctgtgattctctgtgt

SEQ ID NO: 182019 - DNA, 17 bp, Arabidopsis thaliana
tctgtgattctctgttt

SEQ ID NO: 182020 - DNA, 17 bp, Arabidopsis thaliana
tctgtgctggcgacgca

SEQ ID NO: 182021 - DNA, 17 bp, Arabidopsis thaliana
tctgtggagccttgatg

SEQ ID NO: 182022 - DNA, 17 bp, Arabidopsis thaliana
tctgtggcgaaaaagtc

SEQ ID NO: 182023 - DNA, 17 bp, Arabidopsis thaliana
tctgtgggagaggaggg

SEQ ID NO: 182024 - DNA, 17 bp, Arabidopsis thaliana
tctgttcactgaaatgg

SEQ ID NO: 182025 - DNA, 17 bp, Arabidopsis thaliana
tctgttgactcaaagtt

SEQ ID NO: 182026 - DNA, 17 bp, Arabidopsis thaliana
tcttaaatgaccgctac

SEQ ID NO: 182027 - DNA, 17 bp, Arabidopsis thaliana
tcttaaccatatctttt

SEQ ID NO: 182028 - DNA, 17 bp, Arabidopsis thaliana
tcttacgctatgttgga

SEQ ID NO: 182029 - DNA, 17 bp, Arabidopsis thaliana
tcttacgggggcttcgg

SEQ ID NO: 182030 - DNA, 17 bp, Arabidopsis thaliana
tcttactacaggacgta

SEQ ID NO: 182031 - DNA, 17 bp, Arabidopsis thaliana
tcttaggcagaaagtga

SEQ ID NO: 182032 - DNA, 17 bp, Arabidopsis thaliana
tcttagtccatcctgta

SEQ ID NO: 182033 - DNA, 17 bp, Arabidopsis thaliana
tcttagtcgatcctgta

SEQ ID NO: 182034 - DNA, 17 bp, Arabidopsis thaliana
tcttagtcgcaccctgt

SEQ ID NO: 182035 - DNA, 17 bp, Arabidopsis thaliana
tcttagtcgcactgtag

SEQ ID NO: 182036 - DNA, 17 bp, Arabidopsis thaliana
tcttagtcgcatcctga

SEQ ID NO: 182037 - DNA, 17 bp, Arabidopsis thaliana
tcttagtcgcatcctgc

SEQ ID NO: 182038 - DNA, 17 bp, Arabidopsis thaliana
tcttagtcgcatcctgg

SEQ ID NO: 182039 - DNA, 17 bp, Arabidopsis thaliana
tcttagtcgcatcctgt

SEQ ID NO: 182040 - DNA, 17 bp, Arabidopsis thaliana
tcttagtcgcatcgtac

SEQ ID NO: 182041 - DNA, 17 bp, Arabidopsis thaliana
tcttagtcgcatctgta

SEQ ID NO: 182042 - DNA, 17 bp, Arabidopsis thaliana
tcttagtcgctcctgta

SEQ ID NO: 182043 - DNA, 17 bp, Arabidopsis thaliana
tcttagtcgtatcctgt

SEQ ID NO: 182044 - DNA, 17 bp, Arabidopsis thaliana
tcttagtctcatctgta

SEQ ID NO: 182045 - DNA, 17 bp, Arabidopsis thaliana
tcttagttggtggagcg

SEQ ID NO: 182046 - DNA, 17 bp, Arabidopsis thaliana
tcttatgacttcggtcg

SEQ ID NO: 182047 - DNA, 17 bp, Arabidopsis thaliana
tcttatgcgtcctatct

SEQ ID NO: 182048 - DNA, 17 bp, Arabidopsis thaliana
tcttcaaagattgtaaa

SEQ ID NO: 182049 - DNA, 17 bp, Arabidopsis thaliana
tcttcaactacgtgccg

SEQ ID NO: 182050 - DNA, 17 bp, Arabidopsis thaliana
tcttcagagagctcgtc

SEQ ID NO: 182051 - DNA, 17 bp, Arabidopsis thaliana
tcttcagcctcggagac

SEQ ID NO: 182052 - DNA, 17 bp, Arabidopsis thaliana
tcttcaggctctgtgtt

SEQ ID NO: 182053 - DNA, 17 bp, Arabidopsis thaliana
tcttcagttcgccaact

SEQ ID NO: 182054 - DNA, 17 bp, Arabidopsis thaliana
tcttccaggtacagggt

SEQ ID NO: 182055 - DNA, 17 bp, Arabidopsis thaliana
tcttccgacaaaagatc

SEQ ID NO: 182056 - DNA, 17 bp, Arabidopsis thaliana
tcttccggcaggtcgga

SEQ ID NO: 182057 - DNA, 17 bp, Arabidopsis thaliana
tcttccgtaattacaaa

SEQ ID NO: 182058 - DNA, 17 bp, Arabidopsis thaliana
tcttccgtgagacaagc

SEQ ID NO: 182059 - DNA, 17 bp, Arabidopsis thaliana
tcttcctctttattttg

SEQ ID NO: 182060 - DNA, 17 bp, Arabidopsis thaliana
tcttcctctttgtttac

SEQ ID NO: 182061 - DNA, 17 bp, Arabidopsis thaliana
tcttcgcatcctgtaga

SEQ ID NO: 182062 - DNA, 17 bp, Arabidopsis thaliana
tcttcgtcacacagcta

SEQ ID NO: 182063 - DNA, 17 bp, Arabidopsis thaliana
tcttcgtctgcagggaa

SEQ ID NO: 182064 - DNA, 17 bp, Arabidopsis thaliana
tcttcgtgacggaaacc

SEQ ID NO: 182065 - DNA, 17 bp, Arabidopsis thaliana
tcttctccaaatagtta

SEQ ID NO: 182066 - DNA, 17 bp, Arabidopsis thaliana
tcttctccaaatagttt

SEQ ID NO: 182067 - DNA, 17 bp, Arabidopsis thaliana
tcttctcgagcagcttc

SEQ ID NO: 182068 - DNA, 17 bp, Arabidopsis thaliana
tcttctgtaatcttgag

SEQ ID NO: 182069 - DNA, 17 bp, Arabidopsis thaliana
tcttcttcgaatttgtc

SEQ ID NO: 182070 - DNA, 17 bp, Arabidopsis thaliana
tcttcttgagactttgt

SEQ ID NO: 182071 - DNA, 17 bp, Arabidopsis thaliana
tcttcttggataaagac

SEQ ID NO: 182072 - DNA, 17 bp, Arabidopsis thaliana
tcttcttggatcagtga

SEQ ID NO: 182073 - DNA, 17 bp, Arabidopsis thaliana
tcttcttttgccgatgc

SEQ ID NO: 182074 - DNA, 17 bp, Arabidopsis thaliana
tcttgaaaaagttcttg

SEQ ID NO: 182075 - DNA, 17 bp, Arabidopsis thaliana
tcttgaaactcaggatt

SEQ ID NO: 182076 - DNA, 17 bp, Arabidopsis thaliana
tcttgacagcaggacgg

SEQ ID NO: 182077 - DNA, 17 bp, Arabidopsis thaliana
tcttgaccttgtaagac

SEQ ID NO: 182078 - DNA, 17 bp, Arabidopsis thaliana
tcttgagattgtaagga

SEQ ID NO: 182079 - DNA, 17 bp, Arabidopsis thaliana
tcttgagggtttgattg

SEQ ID NO: 182080 - DNA, 17 bp, Arabidopsis thaliana
tcttgaggtccctactg

SEQ ID NO: 182081 - DNA, 17 bp, Arabidopsis thaliana
tcttgaggttcctactg

SEQ ID NO: 182082 - DNA, 17 bp, Arabidopsis thaliana
tcttgagtttgtcacgt

SEQ ID NO: 182083 - DNA, 17 bp, Arabidopsis thaliana
tcttgatcacgagttga

SEQ ID NO: 182084 - DNA, 17 bp, Arabidopsis thaliana
tcttgatgagtcggagc

SEQ ID NO: 182085 - DNA, 17 bp, Arabidopsis thaliana
tcttgatgatgctgcat

SEQ ID NO: 182086 - DNA, 17 bp, Arabidopsis thaliana
tcttgattttgttttca

SEQ ID NO: 182087 - DNA, 17 bp, Arabidopsis thaliana
tcttgcagcgttgtttg

SEQ ID NO: 182088 - DNA, 17 bp, Arabidopsis thaliana
tcttgcgggagaagcca

SEQ ID NO: 182089 - DNA, 17 bp, Arabidopsis thaliana
tcttgctgttgcgtcat

SEQ ID NO: 182090 - DNA, 17 bp, Arabidopsis thaliana
tcttgctttcgtcttac

SEQ ID NO: 182091 - DNA, 17 bp, Arabidopsis thaliana
tcttggccttgtcattt

SEQ ID NO: 182092 - DNA, 17 bp, Arabidopsis thaliana
tcttgggatgatggtgt

SEQ ID NO: 182093 - DNA, 17 bp, Arabidopsis thaliana
tcttgggggagaagcca

SEQ ID NO: 182094 - DNA, 17 bp, Arabidopsis thaliana
tcttgtaacacggacca

SEQ ID NO: 182095 - DNA, 17 bp, Arabidopsis thaliana
tcttgtagcgttgtttg

SEQ ID NO: 182096 - DNA, 17 bp, Arabidopsis thaliana
tcttgtcgtgcgcgttg

SEQ ID NO: 182097 - DNA, 17 bp, Arabidopsis thaliana
tcttgtgaatcttaatg

SEQ ID NO: 182098 - DNA, 17 bp, Arabidopsis thaliana
tcttgttagtttggtta

SEQ ID NO: 182099 - DNA, 17 bp, Arabidopsis thaliana
tctttccactaagcaga

SEQ ID NO: 182100 - DNA, 17 bp, Arabidopsis thaliana
tctttcccaaatgtaga

SEQ ID NO: 182101 - DNA, 17 bp, Arabidopsis thaliana
tctttctaaacgtttta

SEQ ID NO: 182102 - DNA, 17 bp, Arabidopsis thaliana
tctttctccaccattta

SEQ ID NO: 182103 - DNA, 17 bp, Arabidopsis thaliana
tctttctccaccatttt

SEQ ID NO: 182104 - DNA, 17 bp, Arabidopsis thaliana
tctttctgctcacatga

SEQ ID NO: 182105 - DNA, 17 bp, Arabidopsis thaliana
tctttcttcctggattt

SEQ ID NO: 182106 - DNA, 17 bp, Arabidopsis thaliana
tctttcttgattctatg

SEQ ID NO: 182107 - DNA, 17 bp, Arabidopsis thaliana
tctttggattgaaggga

SEQ ID NO: 182108 - DNA, 17 bp, Arabidopsis thaliana
tctttggcattctgtcc

SEQ ID NO: 182109 - DNA, 17 bp, Arabidopsis thaliana
tctttgtcgtgctatcg

SEQ ID NO: 182110 - DNA, 17 bp, Arabidopsis thaliana
tctttgtttaccagttt

SEQ ID NO: 182111 - DNA, 17 bp, Arabidopsis thaliana
tcttttcaggcggctga

SEQ ID NO: 182112 - DNA, 17 bp, Arabidopsis thaliana
tcttttcgaattttgtc

SEQ ID NO: 182113 - DNA, 17 bp, Arabidopsis thaliana
tcttttcggatgatcag

SEQ ID NO: 182114 - DNA, 17 bp, Arabidopsis thaliana
tcttttcgtttccattg

SEQ ID NO: 182115 - DNA, 17 bp, Arabidopsis thaliana
tcttttctcttcgattc

SEQ ID NO: 182116 - DNA, 17 bp, Arabidopsis thaliana
tcttttctgtttaacag

SEQ ID NO: 182117 - DNA, 17 bp, Arabidopsis thaliana
tcttttgcagatgtgct

SEQ ID NO: 182118 - DNA, 17 bp, Arabidopsis thaliana
tcttttgcctgactctg

SEQ ID NO: 182119 - DNA, 17 bp, Arabidopsis thaliana
tcttttgtcggaaaata

SEQ ID NO: 182120 - DNA, 17 bp, Arabidopsis thaliana
tcttttgtcggaaaatt

SEQ ID NO: 182121 - DNA, 17 bp, Arabidopsis thaliana
tctttttcttgaccttg

SEQ ID NO: 182122 - DNA, 17 bp, Arabidopsis thaliana
tctttttcttggttttt

SEQ ID NO: 182123 - DNA, 17 bp, Arabidopsis thaliana
tctttttgaggctatta

SEQ ID NO: 182124 - DNA, 17 bp, Arabidopsis thaliana
tctttttggttccggcc

SEQ ID NO: 182125 - DNA, 17 bp, Arabidopsis thaliana
tcttttttaccattttc

SEQ ID NO: 182126 - DNA, 17 bp, Arabidopsis thaliana
tcttttttcccggtagg

SEQ ID NO: 182127 - DNA, 17 bp, Arabidopsis thaliana
tgaaaaaaaatccattg

SEQ ID NO: 182128 - DNA, 17 bp, Arabidopsis thaliana
tgaaaaatcagcggatg

SEQ ID NO: 182129 - DNA, 17 bp, Arabidopsis thaliana
tgaaaacagaatcaagg

SEQ ID NO: 182130 - DNA, 17 bp, Arabidopsis thaliana
tgaaaacagggtgtact

SEQ ID NO: 182131 - DNA, 17 bp, Arabidopsis thaliana
tgaaaagagagtcaaag

SEQ ID NO: 182132 - DNA, 17 bp, Arabidopsis thaliana
tgaaaagatgcccgtgg

SEQ ID NO: 182133 - DNA, 17 bp, Arabidopsis thaliana
tgaaaaggattgacaga

SEQ ID NO: 182134 - DNA, 17 bp, Arabidopsis thaliana
tgaaaatcggacgtctt

SEQ ID NO: 182135 - DNA, 17 bp, Arabidopsis thaliana
tgaaaatctcatttact

SEQ ID NO: 182136 - DNA, 17 bp, Arabidopsis thaliana
tgaaaatgactattcct

SEQ ID NO: 182137 - DNA, 17 bp, Arabidopsis thaliana
tgaaaatggtggagaaa

SEQ ID NO: 182138 - DNA, 17 bp, Arabidopsis thaliana
tgaaacagacagaacca

SEQ ID NO: 182139 - DNA, 17 bp, Arabidopsis thaliana
tgaaacagacagaacct

SEQ ID NO: 182140 - DNA, 17 bp, Arabidopsis thaliana
tgaaacgcgaatgtgac

SEQ ID NO: 182141 - DNA, 17 bp, Arabidopsis thaliana
tgaaacggaagtaggat

SEQ ID NO: 182142 - DNA, 17 bp, Arabidopsis thaliana
tgaaactagtatgaata

SEQ ID NO: 182143 - DNA, 17 bp, Arabidopsis thaliana
tgaaactgccagcatga

SEQ ID NO: 182144 - DNA, 17 bp, Arabidopsis thaliana
tgaaactgcgaatggct

SEQ ID NO: 182145 - DNA, 17 bp, Arabidopsis thaliana
tgaaagacccaccggat

SEQ ID NO: 182146 - DNA, 17 bp, Arabidopsis thaliana
tgaaagacgaacaactg

SEQ ID NO: 182147 - DNA, 17 bp, Arabidopsis thaliana
tgaaagccagtctcaac

SEQ ID NO: 182148 - DNA, 17 bp, Arabidopsis thaliana
tgaaagcgactacatcg

SEQ ID NO: 182149 - DNA, 17 bp, Arabidopsis thaliana
tgaaagcgtggcctatc

SEQ ID NO: 182150 - DNA, 17 bp, Arabidopsis thaliana
tgaaagctttgactcgt

SEQ ID NO: 182151 - DNA, 17 bp, Arabidopsis thaliana
tgaaagtaactacatcg

SEQ ID NO: 182152 - DNA, 17 bp, Arabidopsis thaliana
tgaaagtgaccacatcg

SEQ ID NO: 182153 - DNA, 17 bp, Arabidopsis thaliana
tgaaagtgactacatca

SEQ ID NO: 182154 - DNA, 17 bp, Arabidopsis thaliana
tgaaagtgactacatcg

SEQ ID NO: 182155 - DNA, 17 bp, Arabidopsis thaliana
tgaaagtgactacattg

SEQ ID NO: 182156 - DNA, 17 bp, Arabidopsis thaliana
tgaaagtgactagatcg

SEQ ID NO: 182157 - DNA, 17 bp, Arabidopsis thaliana
tgaaagtggctacatcg

SEQ ID NO: 182158 - DNA, 17 bp, Arabidopsis thaliana
tgaaagtgtctacatcg

SEQ ID NO: 182159 - DNA, 17 bp, Arabidopsis thaliana
tgaaatgctttacgtct

SEQ ID NO: 182160 - DNA, 17 bp, Arabidopsis thaliana
tgaaatttcatcgtgat

SEQ ID NO: 182161 - DNA, 17 bp, Arabidopsis thaliana
tgaacaacctggccggc

SEQ ID NO: 182162 - DNA, 17 bp, Arabidopsis thaliana
tgaacaagcggatgaat

SEQ ID NO: 182163 - DNA, 17 bp, Arabidopsis thaliana
tgaacacagagtttgca

SEQ ID NO: 182164 - DNA, 17 bp, Arabidopsis thaliana
tgaacacccagctttcc

SEQ ID NO: 182165 - DNA, 17 bp, Arabidopsis thaliana
tgaacagattgagtgca

SEQ ID NO: 182166 - DNA, 17 bp, Arabidopsis thaliana
tgaacagttgatgatac

SEQ ID NO: 182167 - DNA, 17 bp, Arabidopsis thaliana
tgaaccaaggatgactt

SEQ ID NO: 182168 - DNA, 17 bp, Arabidopsis thaliana
tgaaccactgccagcca

SEQ ID NO: 182169 - DNA, 17 bp, Arabidopsis thaliana
tgaaccattgcggttgt

SEQ ID NO: 182170 - DNA, 17 bp, Arabidopsis thaliana
tgaaccgaacgcggggt

SEQ ID NO: 182171 - DNA, 17 bp, Arabidopsis thaliana
tgaacctctgtggtagc

SEQ ID NO: 182172 - DNA, 17 bp, Arabidopsis thaliana
tgaacctgcggaaggat

SEQ ID NO: 182173 - DNA, 17 bp, Arabidopsis thaliana
tgaaccttggaagaaaa

SEQ ID NO: 182174 - DNA, 17 bp, Arabidopsis thaliana
tgaacgaattcagactc

SEQ ID NO: 182175 - DNA, 17 bp, Arabidopsis thaliana
tgaacgaattcagactg

SEQ ID NO: 182176 - DNA, 17 bp, Arabidopsis thaliana
tgaacgcaagttgcgcc

SEQ ID NO: 182177 - DNA, 17 bp, Arabidopsis thaliana
tgaacgccgtatggact

SEQ ID NO: 182178 - DNA, 17 bp, Arabidopsis thaliana
tgaacggagaccagcgg

SEQ ID NO: 182179 - DNA, 17 bp, Arabidopsis thaliana
tgaacggcccggcgttg

SEQ ID NO: 182180 - DNA, 17 bp, Arabidopsis thaliana
tgaactatgcctgagcg

SEQ ID NO: 182181 - DNA, 17 bp, Arabidopsis thaliana
tgaactgctggacgctt

SEQ ID NO: 182182 - DNA, 17 bp, Arabidopsis thaliana
tgaactgttttaaaatt

SEQ ID NO: 182183 - DNA, 17 bp, Arabidopsis thaliana
tgaacttaactgcgtcc

SEQ ID NO: 182184 - DNA, 17 bp, Arabidopsis thaliana
tgaacttgtgtattttg

SEQ ID NO: 182185 - DNA, 17 bp, Arabidopsis thaliana
tgaagaaacctcatttc

SEQ ID NO: 182186 - DNA, 17 bp, Arabidopsis thaliana
tgaagaaactcatcaca

SEQ ID NO: 182187 - DNA, 17 bp, Arabidopsis thaliana
tgaagaacgtagcgaaa

SEQ ID NO: 182188 - DNA, 17 bp, Arabidopsis thaliana
tgaagacgacttggaac

SEQ ID NO: 182189 - DNA, 17 bp, Arabidopsis thaliana
tgaagaggacttggaac

SEQ ID NO: 182190 - DNA, 17 bp, Arabidopsis thaliana
tgaagaggacttgggac

SEQ ID NO: 182191 - DNA, 17 bp, Arabidopsis thaliana
tgaagatccgttcttga

SEQ ID NO: 182192 - DNA, 17 bp, Arabidopsis thaliana
tgaagcagccagcatga

SEQ ID NO: 182193 - DNA, 17 bp, Arabidopsis thaliana
tgaagccagcatgatct

SEQ ID NO: 182194 - DNA, 17 bp, Arabidopsis thaliana
tgaagccagcctcacgc

SEQ ID NO: 182195 - DNA, 17 bp, Arabidopsis thaliana
tgaagccatctcgtact

SEQ ID NO: 182196 - DNA, 17 bp, Arabidopsis thaliana
tgaagccgccagcatga

SEQ ID NO: 182197 - DNA, 17 bp, Arabidopsis thaliana
tgaagctaccagcatga

SEQ ID NO: 182198 - DNA, 17 bp, Arabidopsis thaliana
tgaagctgccaacatga

SEQ ID NO: 182199 - DNA, 17 bp, Arabidopsis thaliana
tgaagctgccaccatga

SEQ ID NO: 182200 - DNA, 17 bp, Arabidopsis thaliana
tgaagctgccagcaagc

SEQ ID NO: 182201 - DNA, 17 bp, Arabidopsis thaliana
tgaagctgccagcacga

SEQ ID NO: 182202 - DNA, 17 bp, Arabidopsis thaliana
tgaagctgccagcatga

SEQ ID NO: 182203 - DNA, 17 bp, Arabidopsis thaliana
tgaagctgccagcatgg

SEQ ID NO: 182204 - DNA, 17 bp, Arabidopsis thaliana
tgaagctgccagcatgt

SEQ ID NO: 182205 - DNA, 17 bp, Arabidopsis thaliana
tgaagctgccagcatta

SEQ ID NO: 182206 - DNA, 17 bp, Arabidopsis thaliana
tgaagctgccagcgtga

SEQ ID NO: 182207 - DNA, 17 bp, Arabidopsis thaliana
tgaagctgccagtatga

SEQ ID NO: 182208 - DNA, 17 bp, Arabidopsis thaliana
tgaagctgctagcatga

SEQ ID NO: 182209 - DNA, 17 bp, Arabidopsis thaliana
tgaagctgtcagcatga

SEQ ID NO: 182210 - DNA, 17 bp, Arabidopsis thaliana
tgaagctgttagcacga

SEQ ID NO: 182211 - DNA, 17 bp, Arabidopsis thaliana
tgaaggagtggtgagag

SEQ ID NO: 182212 - DNA, 17 bp, Arabidopsis thaliana
tgaagggatgcctccac

SEQ ID NO: 182213 - DNA, 17 bp, Arabidopsis thaliana
tgaagggatgtgcaagg

SEQ ID NO: 182214 - DNA, 17 bp, Arabidopsis thaliana
tgaagggtttggtcttc

SEQ ID NO: 182215 - DNA, 17 bp, Arabidopsis thaliana
tgaaggtcgcgattctt

SEQ ID NO: 182216 - DNA, 17 bp, Arabidopsis thaliana
tgaagtacagaacgcta

SEQ ID NO: 182217 - DNA, 17 bp, Arabidopsis thaliana
tgaagtcggaactgacc

SEQ ID NO: 182218 - DNA, 17 bp, Arabidopsis thaliana
tgaagtcttaagatgca

SEQ ID NO: 182219 - DNA, 17 bp, Arabidopsis thaliana
tgaagtgtagaggccta

SEQ ID NO: 182220 - DNA, 17 bp, Arabidopsis thaliana
tgaagttgccagcatga

SEQ ID NO: 182221 - DNA, 17 bp, Arabidopsis thaliana
tgaagttgccagcatgg

SEQ ID NO: 182222 - DNA, 17 bp, Arabidopsis thaliana
tgaagtttcctaatgca

SEQ ID NO: 182223 - DNA, 17 bp, Arabidopsis thaliana
tgaataacaacctccac

SEQ ID NO: 182224 - DNA, 17 bp, Arabidopsis thaliana
tgaatcagaagcattca

SEQ ID NO: 182225 - DNA, 17 bp, Arabidopsis thaliana
tgaatcagaagcattcc

SEQ ID NO: 182226 - DNA, 17 bp, Arabidopsis thaliana
tgaatcaggtatgtcaa

SEQ ID NO: 182227 - DNA, 17 bp, Arabidopsis thaliana
tgaatctcagtggatcg

SEQ ID NO: 182228 - DNA, 17 bp, Arabidopsis thaliana
tgaatctgccagcatga

SEQ ID NO: 182229 - DNA, 17 bp, Arabidopsis thaliana
tgaatctggatgatgct

SEQ ID NO: 182230 - DNA, 17 bp, Arabidopsis thaliana
tgaatcttccctagccc

SEQ ID NO: 182231 - DNA, 17 bp, Arabidopsis thaliana
tgaatcttccgacaaaa

SEQ ID NO: 182232 - DNA, 17 bp, Arabidopsis thaliana
tgaatcttgatgatact

SEQ ID NO: 182233 - DNA, 17 bp, Arabidopsis thaliana
tgaatcttgatgatgca

SEQ ID NO: 182234 - DNA, 17 bp, Arabidopsis thaliana
tgaatcttgatgatgct

SEQ ID NO: 182235 - DNA, 17 bp, Arabidopsis thaliana
tgaatgaaccgtctatt

SEQ ID NO: 182236 - DNA, 17 bp, Arabidopsis thaliana
tgaatgaaccgtttttg

SEQ ID NO: 182237 - DNA, 17 bp, Arabidopsis thaliana
tgaatgatccggtgaag

SEQ ID NO: 182238 - DNA, 17 bp, Arabidopsis thaliana
tgaatgatgcctggctc

SEQ ID NO: 182239 - DNA, 17 bp, Arabidopsis thaliana
tgaatgatgcgtcgcca

SEQ ID NO: 182240 - DNA, 17 bp, Arabidopsis thaliana
tgaatgcacttgttact

SEQ ID NO: 182241 - DNA, 17 bp, Arabidopsis thaliana
tgaatggattaacgaga

SEQ ID NO: 182242 - DNA, 17 bp, Arabidopsis thaliana
tgaatggggttttcctt

SEQ ID NO: 182243 - DNA, 17 bp, Arabidopsis thaliana
tgaatggtaatgattta

SEQ ID NO: 182244 - DNA, 17 bp, Arabidopsis thaliana
tgaatggtaatgatttg

SEQ ID NO: 182245 - DNA, 17 bp, Arabidopsis thaliana
tgaatgtggtagatgca

SEQ ID NO: 182246 - DNA, 17 bp, Arabidopsis thaliana
tgaattaagcggtagat

SEQ ID NO: 182247 - DNA, 17 bp, Arabidopsis thaliana
tgaattcgggggcgtcc

SEQ ID NO: 182248 - DNA, 17 bp, Arabidopsis thaliana
tgaattgactacatcgg

SEQ ID NO: 182249 - DNA, 17 bp, Arabidopsis thaliana
tgacaatcattttgaga

SEQ ID NO: 182250 - DNA, 17 bp, Arabidopsis thaliana
tgacacactgaaggtct

SEQ ID NO: 182251 - DNA, 17 bp, Arabidopsis thaliana
tgacacatggctggtga

SEQ ID NO: 182252 - DNA, 17 bp, Arabidopsis thaliana
tgacacctcctggttag

SEQ ID NO: 182253 - DNA, 17 bp, Arabidopsis thaliana
tgacacggggaggtagt

SEQ ID NO: 182254 - DNA, 17 bp, Arabidopsis thaliana
tgacactaccaggcggc

SEQ ID NO: 182255 - DNA, 17 bp, Arabidopsis thaliana
tgacagaagaaagagag

SEQ ID NO: 182256 - DNA, 17 bp, Arabidopsis thaliana
tgacagaagaaagtgag

SEQ ID NO: 182257 - DNA, 17 bp, Arabidopsis thaliana
tgacagaagagagcgag

SEQ ID NO: 182258 - DNA, 17 bp, Arabidopsis thaliana
tgacagaagagagtgag

SEQ ID NO: 182259 - DNA, 17 bp, Arabidopsis thaliana
tgacagaagagggtaag

SEQ ID NO: 182260 - DNA, 17 bp, Arabidopsis thaliana
tgacagaagatagagag

SEQ ID NO: 182261 - DNA, 17 bp, Arabidopsis thaliana
tgacagcgacgggaaga

SEQ ID NO: 182262 - DNA, 17 bp, Arabidopsis thaliana
tgacagcgacgggatga

SEQ ID NO: 182263 - DNA, 17 bp, Arabidopsis thaliana
tgacagcgacgggatta

SEQ ID NO: 182264 - DNA, 17 bp, Arabidopsis thaliana
tgacaggagagagtgag

SEQ ID NO: 182265 - DNA, 17 bp, Arabidopsis thaliana
tgacataagagagtgaa

SEQ ID NO: 182266 - DNA, 17 bp, Arabidopsis thaliana
tgacatgggactgccta

SEQ ID NO: 182267 - DNA, 17 bp, Arabidopsis thaliana
tgacatgtgtgcgagtc

SEQ ID NO: 182268 - DNA, 17 bp, Arabidopsis thaliana
tgacattgagtgcaagt

SEQ ID NO: 182269 - DNA, 17 bp, Arabidopsis thaliana
tgaccacggtccatgcg

SEQ ID NO: 182270 - DNA, 17 bp, Arabidopsis thaliana
tgaccacggttaactgg

SEQ ID NO: 182271 - DNA, 17 bp, Arabidopsis thaliana
tgaccaggcttcattcc

SEQ ID NO: 182272 - DNA, 17 bp, Arabidopsis thaliana
tgaccagggttcgattc

SEQ ID NO: 182273 - DNA, 17 bp, Arabidopsis thaliana
tgaccatgaccatgacc

SEQ ID NO: 182274 - DNA, 17 bp, Arabidopsis thaliana
tgaccatgttgcagata

SEQ ID NO: 182275 - DNA, 17 bp, Arabidopsis thaliana
tgacccccttgatgatc

SEQ ID NO: 182276 - DNA, 17 bp, Arabidopsis thaliana
tgacccgttcggcacct

SEQ ID NO: 182277 - DNA, 17 bp, Arabidopsis thaliana
tgaccctaaatcgcaaa

SEQ ID NO: 182278 - DNA, 17 bp, Arabidopsis thaliana
tgacccttcgggaagtc

SEQ ID NO: 182279 - DNA, 17 bp, Arabidopsis thaliana
tgaccgccgagcttctt

SEQ ID NO: 182280 - DNA, 17 bp, Arabidopsis thaliana
tgaccgctacactgctt

SEQ ID NO: 182281 - DNA, 17 bp, Arabidopsis thaliana
tgaccggagcaggagat

SEQ ID NO: 182282 - DNA, 17 bp, Arabidopsis thaliana
tgaccgtagggttgtcg

SEQ ID NO: 182283 - DNA, 17 bp, Arabidopsis thaliana
tgacctaggttctgttt

SEQ ID NO: 182284 - DNA, 17 bp, Arabidopsis thaliana
tgacctcatttggtttc

SEQ ID NO: 182285 - DNA, 17 bp, Arabidopsis thaliana
tgacctcatttggtttg

SEQ ID NO: 182286 - DNA, 17 bp, Arabidopsis thaliana
tgacctggacggccgga

SEQ ID NO: 182287 - DNA, 17 bp, Arabidopsis thaliana
tgacctggatatggagg

SEQ ID NO: 182288 - DNA, 17 bp, Arabidopsis thaliana
tgacgaactgggtctga

SEQ ID NO: 182289 - DNA, 17 bp, Arabidopsis thaliana
tgacgaagacgtagcta

SEQ ID NO: 182290 - DNA, 17 bp, Arabidopsis thaliana
tgacgaagttgctttga

SEQ ID NO: 182291 - DNA, 17 bp, Arabidopsis thaliana
tgacgacaatggcaagg

SEQ ID NO: 182292 - DNA, 17 bp, Arabidopsis thaliana
tgacgacatatgagtat

SEQ ID NO: 182293 - DNA, 17 bp, Arabidopsis thaliana
tgacgactggtacatca

SEQ ID NO: 182294 - DNA, 17 bp, Arabidopsis thaliana
tgacgagagaacttatt

SEQ ID NO: 182295 - DNA, 17 bp, Arabidopsis thaliana
tgacgagaggtgaacaa

SEQ ID NO: 182296 - DNA, 17 bp, Arabidopsis thaliana
tgacgagctgttcgaga

SEQ ID NO: 182297 - DNA, 17 bp, Arabidopsis thaliana
tgacgcaatgtgatttc

SEQ ID NO: 182298 - DNA, 17 bp, Arabidopsis thaliana
tgacgcagttaatgagg

SEQ ID NO: 182299 - DNA, 17 bp, Arabidopsis thaliana
tgacgcgaatccaatcg

SEQ ID NO: 182300 - DNA, 17 bp, Arabidopsis thaliana
tgacgcgcatgaatgga

SEQ ID NO: 182301 - DNA, 17 bp, Arabidopsis thaliana
tgacggaagggcaccac

SEQ ID NO: 182302 - DNA, 17 bp, Arabidopsis thaliana
tgacggagaattaggga

SEQ ID NO: 182303 - DNA, 17 bp, Arabidopsis thaliana
tgacggagggcaccacc

SEQ ID NO: 182304 - DNA, 17 bp, Arabidopsis thaliana
tgacggcaccaggtaag

SEQ ID NO: 182305 - DNA, 17 bp, Arabidopsis thaliana
tgacggcagttgacggc

SEQ ID NO: 182306 - DNA, 17 bp, Arabidopsis thaliana
tgacggctgccgtgagt

SEQ ID NO: 182307 - DNA, 17 bp, Arabidopsis thaliana
tgacgggattggtggct

SEQ ID NO: 182308 - DNA, 17 bp, Arabidopsis thaliana
tgacgtcgtcccattgc

SEQ ID NO: 182309 - DNA, 17 bp, Arabidopsis thaliana
tgactacgtccctgccc

SEQ ID NO: 182310 - DNA, 17 bp, Arabidopsis thaliana
tgactatgacctggacg

SEQ ID NO: 182311 - DNA, 17 bp, Arabidopsis thaliana
tgactcgaacgaataaa

SEQ ID NO: 182312 - DNA, 17 bp, Arabidopsis thaliana
tgactcgaacgaataag

SEQ ID NO: 182313 - DNA, 17 bp, Arabidopsis thaliana
tgactcgaacgaatgaa

SEQ ID NO: 182314 - DNA, 17 bp, Arabidopsis thaliana
tgactcgaacgaatgac

SEQ ID NO: 182315 - DNA, 17 bp, Arabidopsis thaliana
tgactcgaacgaattag

SEQ ID NO: 182316 - DNA, 17 bp, Arabidopsis thaliana
tgactcgagcgaatgaa

SEQ ID NO: 182317 - DNA, 17 bp, Arabidopsis thaliana
tgactcgctttcggttc

SEQ ID NO: 182318 - DNA, 17 bp, Arabidopsis thaliana
tgactcggtcaatggcg

SEQ ID NO: 182319 - DNA, 17 bp, Arabidopsis thaliana
tgactctagtccgactt

SEQ ID NO: 182320 - DNA, 17 bp, Arabidopsis thaliana
tgactctcttaaggtag

SEQ ID NO: 182321 - DNA, 17 bp, Arabidopsis thaliana
tgactgaacgcctctaa

SEQ ID NO: 182322 - DNA, 17 bp, Arabidopsis thaliana
tgactgagccgcgccaa

SEQ ID NO: 182323 - DNA, 17 bp, Arabidopsis thaliana
tgactgagccgtgtcaa

SEQ ID NO: 182324 - DNA, 17 bp, Arabidopsis thaliana
tgactgtgctgtagata

SEQ ID NO: 182325 - DNA, 17 bp, Arabidopsis thaliana
tgactgtgctgtagatc

SEQ ID NO: 182326 - DNA, 17 bp, Arabidopsis thaliana
tgactgttcgacgcccg

SEQ ID NO: 182327 - DNA, 17 bp, Arabidopsis thaliana
tgactgttgtctggctc

SEQ ID NO: 182328 - DNA, 17 bp, Arabidopsis thaliana
tgacttatcgctctgat

SEQ ID NO: 182329 - DNA, 17 bp, Arabidopsis thaliana
tgacttcgtttttcggt

SEQ ID NO: 182330 - DNA, 17 bp, Arabidopsis thaliana
tgacttgcttcatgtag

SEQ ID NO: 182331 - DNA, 17 bp, Arabidopsis thaliana
tgacttgggtatagggg

SEQ ID NO: 182332 - DNA, 17 bp, Arabidopsis thaliana
tgactttgagggtggcg

SEQ ID NO: 182333 - DNA, 17 bp, Arabidopsis thaliana
tgagaaatctgcttagt

SEQ ID NO: 182334 - DNA, 17 bp, Arabidopsis thaliana
tgagaagaagccatttt

SEQ ID NO: 182335 - DNA, 17 bp, Arabidopsis thaliana
tgagaagcagctgatcc

SEQ ID NO: 182336 - DNA, 17 bp, Arabidopsis thaliana
tgagaatctggatgacc

SEQ ID NO: 182337 - DNA, 17 bp, Arabidopsis thaliana
tgagaatcttgatgatg

SEQ ID NO: 182338 - DNA, 17 bp, Arabidopsis thaliana
tgagaatgcaaatccta

SEQ ID NO: 182339 - DNA, 17 bp, Arabidopsis thaliana
tgagaatgcaaatcctt

SEQ ID NO: 182340 - DNA, 17 bp, Arabidopsis thaliana
tgagacaaatcattacc

SEQ ID NO: 182341 - DNA, 17 bp, Arabidopsis thaliana
tgagacaaccgggatgt

SEQ ID NO: 182342 - DNA, 17 bp, Arabidopsis thaliana
tgagacattgagttttt

SEQ ID NO: 182343 - DNA, 17 bp, Arabidopsis thaliana
tgagacctatttactta

SEQ ID NO: 182344 - DNA, 17 bp, Arabidopsis thaliana
tgagacctatttacttg

SEQ ID NO: 182345 - DNA, 17 bp, Arabidopsis thaliana
tgagacctatttattta

SEQ ID NO: 182346 - DNA, 17 bp, Arabidopsis thaliana
tgagacgctataactca

SEQ ID NO: 182347 - DNA, 17 bp, Arabidopsis thaliana
tgagacggagtgtgggc

SEQ ID NO: 182348 - DNA, 17 bp, Arabidopsis thaliana
tgagagaaatcacgaaa

SEQ ID NO: 182349 - DNA, 17 bp, Arabidopsis thaliana
tgagagatcaagtttgt

SEQ ID NO: 182350 - DNA, 17 bp, Arabidopsis thaliana
tgagatcggaccagcag

SEQ ID NO: 182351 - DNA, 17 bp, Arabidopsis thaliana
tgagatgaaatctttga

SEQ ID NO: 182352 - DNA, 17 bp, Arabidopsis thaliana
tgagattcagccctttg

SEQ ID NO: 182353 - DNA, 17 bp, Arabidopsis thaliana
tgagattcagtcctttg

SEQ ID NO: 182354 - DNA, 17 bp, Arabidopsis thaliana
tgagattgtaaggatac

SEQ ID NO: 182355 - DNA, 17 bp, Arabidopsis thaliana
tgagatttgggatgtgc

SEQ ID NO: 182356 - DNA, 17 bp, Arabidopsis thaliana
tgagcagcatccaaata

SEQ ID NO: 182357 - DNA, 17 bp, Arabidopsis thaliana
tgagcagcctcgtcgcc

SEQ ID NO: 182358 - DNA, 17 bp, Arabidopsis thaliana
tgagcagtggatagcag

SEQ ID NO: 182359 - DNA, 17 bp, Arabidopsis thaliana
tgagcatgatgcttgtc

SEQ ID NO: 182360 - DNA, 17 bp, Arabidopsis thaliana
tgagccaaggacgactt

SEQ ID NO: 182361 - DNA, 17 bp, Arabidopsis thaliana
tgagccaaggaggactt

SEQ ID NO: 182362 - DNA, 17 bp, Arabidopsis thaliana
tgagccaaggataactt

SEQ ID NO: 182363 - DNA, 17 bp, Arabidopsis thaliana
tgagccaaggatgacta

SEQ ID NO: 182364 - DNA, 17 bp, Arabidopsis thaliana
tgagccaaggatgactt

SEQ ID NO: 182365 - DNA, 17 bp, Arabidopsis thaliana
tgagccaaggatgattt

SEQ ID NO: 182366 - DNA, 17 bp, Arabidopsis thaliana
tgagccaggtgcacaag

SEQ ID NO: 182367 - DNA, 17 bp, Arabidopsis thaliana
tgagccatgacttgccg

SEQ ID NO: 182368 - DNA, 17 bp, Arabidopsis thaliana
tgagccatttttggtaa

SEQ ID NO: 182369 - DNA, 17 bp, Arabidopsis thaliana
tgagcccttgtggtagc

SEQ ID NO: 182370 - DNA, 17 bp, Arabidopsis thaliana
tgagccgaggatgactt

SEQ ID NO: 182371 - DNA, 17 bp, Arabidopsis thaliana
tgagccgtttccagggt

SEQ ID NO: 182372 - DNA, 17 bp, Arabidopsis thaliana
tgagcctccgtggtagc

SEQ ID NO: 182373 - DNA, 17 bp, Arabidopsis thaliana
tgagcctctctggtagc

SEQ ID NO: 182374 - DNA, 17 bp, Arabidopsis thaliana
tgagcctctgtgatagc

SEQ ID NO: 182375 - DNA, 17 bp, Arabidopsis thaliana
tgagcctctgtggtaga

SEQ ID NO: 182376 - DNA, 17 bp, Arabidopsis thaliana
tgagcctctgtggtagc

SEQ ID NO: 182377 - DNA, 17 bp, Arabidopsis thaliana
tgagcctctgtggtggc

SEQ ID NO: 182378 - DNA, 17 bp, Arabidopsis thaliana
tgagcctctgtgttagc

SEQ ID NO: 182379 - DNA, 17 bp, Arabidopsis thaliana
tgagcctggttttcgtg

SEQ ID NO: 182380 - DNA, 17 bp, Arabidopsis thaliana
tgagcctttgtggtagc

SEQ ID NO: 182381 - DNA, 17 bp, Arabidopsis thaliana
tgagcgagtcgggatgg

SEQ ID NO: 182382 - DNA, 17 bp, Arabidopsis thaliana
tgagcgattggtttgta

SEQ ID NO: 182383 - DNA, 17 bp, Arabidopsis thaliana
tgagcggattatccggg

SEQ ID NO: 182384 - DNA, 17 bp, Arabidopsis thaliana
tgagcggtgacgaaatt

SEQ ID NO: 182385 - DNA, 17 bp, Arabidopsis thaliana
tgagcgtgaactactac

SEQ ID NO: 182386 - DNA, 17 bp, Arabidopsis thaliana
tgagctaagcgggcgat

SEQ ID NO: 182387 - DNA, 17 bp, Arabidopsis thaliana
tgagctatagcccttgt

SEQ ID NO: 182388 - DNA, 17 bp, Arabidopsis thaliana
tgagctgggtttagacc

SEQ ID NO: 182389 - DNA, 17 bp, Arabidopsis thaliana
tgagctgtgatgaaata

SEQ ID NO: 182390 - DNA, 17 bp, Arabidopsis thaliana
tgagctgtgatgaaatt

SEQ ID NO: 182391 - DNA, 17 bp, Arabidopsis thaliana
tgagcttagacttcctc

SEQ ID NO: 182392 - DNA, 17 bp, Arabidopsis thaliana
tgagcttgccgggcttg

SEQ ID NO: 182393 - DNA, 17 bp, Arabidopsis thaliana
tgaggaaccactcacat

SEQ ID NO: 182394 - DNA, 17 bp, Arabidopsis thaliana
tgaggaagagactcgtc

SEQ ID NO: 182395 - DNA, 17 bp, Arabidopsis thaliana
tgaggaaggaaaggaga

SEQ ID NO: 182396 - DNA, 17 bp, Arabidopsis thaliana
tgaggatcgatttcatt

SEQ ID NO: 182397 - DNA, 17 bp, Arabidopsis thaliana
tgaggattcgaagctgt

SEQ ID NO: 182398 - DNA, 17 bp, Arabidopsis thaliana
tgaggcaataacaggtc

SEQ ID NO: 182399 - DNA, 17 bp, Arabidopsis thaliana
tgagggacgacgatttg

SEQ ID NO: 182400 - DNA, 17 bp, Arabidopsis thaliana
tgagggagaaagcccac

SEQ ID NO: 182401 - DNA, 17 bp, Arabidopsis thaliana
tgagggctgggctcggg

SEQ ID NO: 182402 - DNA, 17 bp, Arabidopsis thaliana
tgagggtcggcaatcga

SEQ ID NO: 182403 - DNA, 17 bp, Arabidopsis thaliana
tgaggtccctactgaat

SEQ ID NO: 182404 - DNA, 17 bp, Arabidopsis thaliana
tgaggtgattagcccgt

SEQ ID NO: 182405 - DNA, 17 bp, Arabidopsis thaliana
tgaggtgctttgaatgg

SEQ ID NO: 182406 - DNA, 17 bp, Arabidopsis thaliana
tgagtacaatctaaatc

SEQ ID NO: 182407 - DNA, 17 bp, Arabidopsis thaliana
tgagtagtcgagaagca

SEQ ID NO: 182408 - DNA, 17 bp, Arabidopsis thaliana
tgagtatcataggggaa

SEQ ID NO: 182409 - DNA, 17 bp, Arabidopsis thaliana
tgagtcaaggatgactt

SEQ ID NO: 182410 - DNA, 17 bp, Arabidopsis thaliana
tgagtctaagcaggttc

SEQ ID NO: 182411 - DNA, 17 bp, Arabidopsis thaliana
tgagtcttacgctggac

SEQ ID NO: 182412 - DNA, 17 bp, Arabidopsis thaliana
tgagtcttacgctggcc

SEQ ID NO: 182413 - DNA, 17 bp, Arabidopsis thaliana
tgagtgagccgtgtcaa

SEQ ID NO: 182414 - DNA, 17 bp, Arabidopsis thaliana
tgagtggtgatcggata

SEQ ID NO: 182415 - DNA, 17 bp, Arabidopsis thaliana
tgagtggttttattgca

SEQ ID NO: 182416 - DNA, 17 bp, Arabidopsis thaliana
tgagttcatgaaacaaa

SEQ ID NO: 182417 - DNA, 17 bp, Arabidopsis thaliana
tgagttcatgaaacaag

SEQ ID NO: 182418 - DNA, 17 bp, Arabidopsis thaliana
tgagtttatagggttgg

SEQ ID NO: 182419 - DNA, 17 bp, Arabidopsis thaliana
tgagttttttttacggg

SEQ ID NO: 182420 - DNA, 17 bp, Arabidopsis thaliana
tgataaattaagtctag

SEQ ID NO: 182421 - DNA, 17 bp, Arabidopsis thaliana
tgataactcgacggatc

SEQ ID NO: 182422 - DNA, 17 bp, Arabidopsis thaliana
tgataagacgcctgggc

SEQ ID NO: 182423 - DNA, 17 bp, Arabidopsis thaliana
tgatacagggccggagg

SEQ ID NO: 182424 - DNA, 17 bp, Arabidopsis thaliana
tgatacgcctatggacg

SEQ ID NO: 182425 - DNA, 17 bp, Arabidopsis thaliana
tgatactcattttcgac

SEQ ID NO: 182426 - DNA, 17 bp, Arabidopsis thaliana
tgatacttccccggtac

SEQ ID NO: 182427 - DNA, 17 bp, Arabidopsis thaliana
tgatagagccgcgccaa

SEQ ID NO: 182428 - DNA, 17 bp, Arabidopsis thaliana
tgatagagccgtgtcga

SEQ ID NO: 182429 - DNA, 17 bp, Arabidopsis thaliana
tgatagggccgcgccaa

SEQ ID NO: 182430 - DNA, 17 bp, Arabidopsis thaliana
tgatagtgttgtagata

SEQ ID NO: 182431 - DNA, 17 bp, Arabidopsis thaliana
tgatagtgttgtagatc

SEQ ID NO: 182432 - DNA, 17 bp, Arabidopsis thaliana
tgatatcaggatcgcat

SEQ ID NO: 182433 - DNA, 17 bp, Arabidopsis thaliana
tgatcaaaacagatgct

SEQ ID NO: 182434 - DNA, 17 bp, Arabidopsis thaliana
tgatcaaaaggtctata

SEQ ID NO: 182435 - DNA, 17 bp, Arabidopsis thaliana
tgatcaacgggttttgt

SEQ ID NO: 182436 - DNA, 17 bp, Arabidopsis thaliana
tgatcaagggatgtgtc

SEQ ID NO: 182437 - DNA, 17 bp, Arabidopsis thaliana
tgatcactgttgtgcaa

SEQ ID NO: 182438 - DNA, 17 bp, Arabidopsis thaliana
tgatccaaaggtctata

SEQ ID NO: 182439 - DNA, 17 bp, Arabidopsis thaliana
tgatccactgagattca

SEQ ID NO: 182440 - DNA, 17 bp, Arabidopsis thaliana
tgatcccaaaacccagc

SEQ ID NO: 182441 - DNA, 17 bp, Arabidopsis thaliana
tgatccctggtcggcag

SEQ ID NO: 182442 - DNA, 17 bp, Arabidopsis thaliana
tgatccctggtcggcga

SEQ ID NO: 182443 - DNA, 17 bp, Arabidopsis thaliana
tgatccgtccactgctg

SEQ ID NO: 182444 - DNA, 17 bp, Arabidopsis thaliana
tgatcctgcggaaggat

SEQ ID NO: 182445 - DNA, 17 bp, Arabidopsis thaliana
tgatcctgctacgtgga

SEQ ID NO: 182446 - DNA, 17 bp, Arabidopsis thaliana
tgatcctgggcagcacc

SEQ ID NO: 182447 - DNA, 17 bp, Arabidopsis thaliana
tgatcgacaacgacgac

SEQ ID NO: 182448 - DNA, 17 bp, Arabidopsis thaliana
tgatcgagccgcgccaa

SEQ ID NO: 182449 - DNA, 17 bp, Arabidopsis thaliana
tgatcgcgagttgaccc

SEQ ID NO: 182450 - DNA, 17 bp, Arabidopsis thaliana
tgatcggtcaccgacac

SEQ ID NO: 182451 - DNA, 17 bp, Arabidopsis thaliana
tgatcgtctctgatggg

SEQ ID NO: 182452 - DNA, 17 bp, Arabidopsis thaliana
tgatctacaacactatc

SEQ ID NO: 182453 - DNA, 17 bp, Arabidopsis thaliana
tgatctacagcacagtc

SEQ ID NO: 182454 - DNA, 17 bp, Arabidopsis thaliana
tgatctagacagtcttc

SEQ ID NO: 182455 - DNA, 17 bp, Arabidopsis thaliana
tgatctatcgattttag

SEQ ID NO: 182456 - DNA, 17 bp, Arabidopsis thaliana
tgatctggttatccggc

SEQ ID NO: 182457 - DNA, 17 bp, Arabidopsis thaliana
tgatcttagagtgttca

SEQ ID NO: 182458 - DNA, 17 bp, Arabidopsis thaliana
tgatcttcaacacaatc

SEQ ID NO: 182459 - DNA, 17 bp, Arabidopsis thaliana
tgatcttgttagtttgg

SEQ ID NO: 182460 - DNA, 17 bp, Arabidopsis thaliana
tgatctttggttcgcgg

SEQ ID NO: 182461 - DNA, 17 bp, Arabidopsis thaliana
tgatcttttccagaatg

SEQ ID NO: 182462 - DNA, 17 bp, Arabidopsis thaliana
tgatctttttcttggtt

SEQ ID NO: 182463 - DNA, 17 bp, Arabidopsis thaliana
tgatgactcgcgcttta

SEQ ID NO: 182464 - DNA, 17 bp, Arabidopsis thaliana
tgatgagtttatagggt

SEQ ID NO: 182465 - DNA, 17 bp, Arabidopsis thaliana
tgatgatgaagagaatg

SEQ ID NO: 182466 - DNA, 17 bp, Arabidopsis thaliana
tgatgatgctgaccgac

SEQ ID NO: 182467 - DNA, 17 bp, Arabidopsis thaliana
tgatgatgctgaccgga

SEQ ID NO: 182468 - DNA, 17 bp, Arabidopsis thaliana
tgatgattcatgataac

SEQ ID NO: 182469 - DNA, 17 bp, Arabidopsis thaliana
tgatgattcgacaaagt

SEQ ID NO: 182470 - DNA, 17 bp, Arabidopsis thaliana
tgatgattctccatgca

SEQ ID NO: 182471 - DNA, 17 bp, Arabidopsis thaliana
tgatgcatttcattatt

SEQ ID NO: 182472 - DNA, 17 bp, Arabidopsis thaliana
tgatgcccttagatgtt

SEQ ID NO: 182473 - DNA, 17 bp, Arabidopsis thaliana
tgatgcgggacggaagc

SEQ ID NO: 182474 - DNA, 17 bp, Arabidopsis thaliana
tgatgctcagattctta

SEQ ID NO: 182475 - DNA, 17 bp, Arabidopsis thaliana
tgatgctcagattcttg

SEQ ID NO: 182476 - DNA, 17 bp, Arabidopsis thaliana
tgatgctcattttcgac

SEQ ID NO: 182477 - DNA, 17 bp, Arabidopsis thaliana
tgatgctgaccggatgt

SEQ ID NO: 182478 - DNA, 17 bp, Arabidopsis thaliana
tgatgcttctcgactac

SEQ ID NO: 182479 - DNA, 17 bp, Arabidopsis thaliana
tgatggagccgcgccaa

SEQ ID NO: 182480 - DNA, 17 bp, Arabidopsis thaliana
tgatggagccgtgtcaa

SEQ ID NO: 182481 - DNA, 17 bp, Arabidopsis thaliana
tgatggcttcgaccttt

SEQ ID NO: 182482 - DNA, 17 bp, Arabidopsis thaliana
tgatggggatagatcat

SEQ ID NO: 182483 - DNA, 17 bp, Arabidopsis thaliana
tgatggtagtccaacaa

SEQ ID NO: 182484 - DNA, 17 bp, Arabidopsis thaliana
tgatggtctatgattat

SEQ ID NO: 182485 - DNA, 17 bp, Arabidopsis thaliana
tgatggttagcaaagaa

SEQ ID NO: 182486 - DNA, 17 bp, Arabidopsis thaliana
tgatgtcgaagttggcc

SEQ ID NO: 182487 - DNA, 17 bp, Arabidopsis thaliana
tgatgtggtctacaatg

SEQ ID NO: 182488 - DNA, 17 bp, Arabidopsis thaliana
tgattaacagggacagt

SEQ ID NO: 182489 - DNA, 17 bp, Arabidopsis thaliana
tgattaccaaatgtatt

SEQ ID NO: 182490 - DNA, 17 bp, Arabidopsis thaliana
tgattaccactactcat

SEQ ID NO: 182491 - DNA, 17 bp, Arabidopsis thaliana
tgattagaggcattggg

SEQ ID NO: 182492 - DNA, 17 bp, Arabidopsis thaliana
tgattagccgcgccaat

SEQ ID NO: 182493 - DNA, 17 bp, Arabidopsis thaliana
tgattcagccgcgccaa

SEQ ID NO: 182494 - DNA, 17 bp, Arabidopsis thaliana
tgattcatgataactcg

SEQ ID NO: 182495 - DNA, 17 bp, Arabidopsis thaliana
tgattcattgtccattg

SEQ ID NO: 182496 - DNA, 17 bp, Arabidopsis thaliana
tgattcccaagtaaata

SEQ ID NO: 182497 - DNA, 17 bp, Arabidopsis thaliana
tgattcgacaaagtgaa

SEQ ID NO: 182498 - DNA, 17 bp, Arabidopsis thaliana
tgattcgcacaattggt

SEQ ID NO: 182499 - DNA, 17 bp, Arabidopsis thaliana
tgattcggggttgggga

SEQ ID NO: 182500 - DNA, 17 bp, Arabidopsis thaliana
tgattctctgtgtaagc

SEQ ID NO: 182501 - DNA, 17 bp, Arabidopsis thaliana
tgattctgctatgttgc

SEQ ID NO: 182502 - DNA, 17 bp, Arabidopsis thaliana
tgattctgtgtgtaagc

SEQ ID NO: 182503 - DNA, 17 bp, Arabidopsis thaliana
tgattgacccgtgtcaa

SEQ ID NO: 182504 - DNA, 17 bp, Arabidopsis thaliana
tgattgagccacgccat

SEQ ID NO: 182505 - DNA, 17 bp, Arabidopsis thaliana
tgattgagccatgtcaa

SEQ ID NO: 182506 - DNA, 17 bp, Arabidopsis thaliana
tgattgagcccgccaat

SEQ ID NO: 182507 - DNA, 17 bp, Arabidopsis thaliana
tgattgagccgagtcaa

SEQ ID NO: 182508 - DNA, 17 bp, Arabidopsis thaliana
tgattgagccgcaccaa

SEQ ID NO: 182509 - DNA, 17 bp, Arabidopsis thaliana
tgattgagccgccaata

SEQ ID NO: 182510 - DNA, 17 bp, Arabidopsis thaliana
tgattgagccgcgccaa

SEQ ID NO: 182511 - DNA, 17 bp, Arabidopsis thaliana
tgattgagccgcgtcaa

SEQ ID NO: 182512 - DNA, 17 bp, Arabidopsis thaliana
tgattgagccgtgccaa

SEQ ID NO: 182513 - DNA, 17 bp, Arabidopsis thaliana
tgattgagccgtgtcaa

SEQ ID NO: 182514 - DNA, 17 bp, Arabidopsis thaliana
tgattgagccgtgtcac

SEQ ID NO: 182515 - DNA, 17 bp, Arabidopsis thaliana
tgattgagccgtgtcag

SEQ ID NO: 182516 - DNA, 17 bp, Arabidopsis thaliana
tgattgagccgtgtcat

SEQ ID NO: 182517 - DNA, 17 bp, Arabidopsis thaliana
tgattgagccgtgtcga

SEQ ID NO: 182518 - DNA, 17 bp, Arabidopsis thaliana
tgattgagccgtgtcta

SEQ ID NO: 182519 - DNA, 17 bp, Arabidopsis thaliana
tgattgagccgtgtgtg

SEQ ID NO: 182520 - DNA, 17 bp, Arabidopsis thaliana
tgattgagccgtgttaa

SEQ ID NO: 182521 - DNA, 17 bp, Arabidopsis thaliana
tgattgagccgttcaat

SEQ ID NO: 182522 - DNA, 17 bp, Arabidopsis thaliana
tgattggaaatttcgtt

SEQ ID NO: 182523 - DNA, 17 bp, Arabidopsis thaliana
tgattggagaaactgtt

SEQ ID NO: 182524 - DNA, 17 bp, Arabidopsis thaliana
tgattggatcttaggaa

SEQ ID NO: 182525 - DNA, 17 bp, Arabidopsis thaliana
tgattggcgggatccct

SEQ ID NO: 182526 - DNA, 17 bp, Arabidopsis thaliana
tgattggcttcgcgtag

SEQ ID NO: 182527 - DNA, 17 bp, Arabidopsis thaliana
tgattgggccgcgccaa

SEQ ID NO: 182528 - DNA, 17 bp, Arabidopsis thaliana
tgattgggccgtgtcaa

SEQ ID NO: 182529 - DNA, 17 bp, Arabidopsis thaliana
tgattggttccgttcta

SEQ ID NO: 182530 - DNA, 17 bp, Arabidopsis thaliana
tgattgtcagatctaat

SEQ ID NO: 182531 - DNA, 17 bp, Arabidopsis thaliana
tgattgtgccgcgccaa

SEQ ID NO: 182532 - DNA, 17 bp, Arabidopsis thaliana
tgattgtgccgtgtcaa

SEQ ID NO: 182533 - DNA, 17 bp, Arabidopsis thaliana
tgattgtgttgaagatc

SEQ ID NO: 182534 - DNA, 17 bp, Arabidopsis thaliana
tgatttccactaccaca

SEQ ID NO: 182535 - DNA, 17 bp, Arabidopsis thaliana
tgatttctccatacatc

SEQ ID NO: 182536 - DNA, 17 bp, Arabidopsis thaliana
tgatttgacggcaaaag

SEQ ID NO: 182537 - DNA, 17 bp, Arabidopsis thaliana
tgattttgaacgcggaa

SEQ ID NO: 182538 - DNA, 17 bp, Arabidopsis thaliana
tgatttttagtttagta

SEQ ID NO: 182539 - DNA, 17 bp, Arabidopsis thaliana
tgatttttagtttagtc

SEQ ID NO: 182540 - DNA, 17 bp, Arabidopsis thaliana
tgcaaaaaaaagtagat

SEQ ID NO: 182541 - DNA, 17 bp, Arabidopsis thaliana
tgcaaaaccgtgataga

SEQ ID NO: 182542 - DNA, 17 bp, Arabidopsis thaliana
tgcaaaaccgtgatagt

SEQ ID NO: 182543 - DNA, 17 bp, Arabidopsis thaliana
tgcaaaagagtaagata

SEQ ID NO: 182544 - DNA, 17 bp, Arabidopsis thaliana
tgcaaagatgcagatca

SEQ ID NO: 182545 - DNA, 17 bp, Arabidopsis thaliana
tgcaaaggaagcatcta

SEQ ID NO: 182546 - DNA, 17 bp, Arabidopsis thaliana
tgcaaatatagacatgt

SEQ ID NO: 182547 - DNA, 17 bp, Arabidopsis thaliana
tgcaaatccagttcttg

SEQ ID NO: 182548 - DNA, 17 bp, Arabidopsis thaliana
tgcaacaactttgtata

SEQ ID NO: 182549 - DNA, 17 bp, Arabidopsis thaliana
tgcaacagtggatcagg

SEQ ID NO: 182550 - DNA, 17 bp, Arabidopsis thaliana
tgcaactcttgcgggag

SEQ ID NO: 182551 - DNA, 17 bp, Arabidopsis thaliana
tgcaactcttttttttt

SEQ ID NO: 182552 - DNA, 17 bp, Arabidopsis thaliana
tgcaactgttctttaga

SEQ ID NO: 182553 - DNA, 17 bp, Arabidopsis thaliana
tgcaagatcaagccaat

SEQ ID NO: 182554 - DNA, 17 bp, Arabidopsis thaliana
tgcaaggcagggaaggt

SEQ ID NO: 182555 - DNA, 17 bp, Arabidopsis thaliana
tgcaaggtatactttgt

SEQ ID NO: 182556 - DNA, 17 bp, Arabidopsis thaliana
tgcaaggtcaagaaaaa

SEQ ID NO: 182557 - DNA, 17 bp, Arabidopsis thaliana
tgcaaggttcaagaaag

SEQ ID NO: 182558 - DNA, 17 bp, Arabidopsis thaliana
tgcaaggttcaagaacg

SEQ ID NO: 182559 - DNA, 17 bp, Arabidopsis thaliana
tgcaagtcgtcaagggc

SEQ ID NO: 182560 - DNA, 17 bp, Arabidopsis thaliana
tgcaagttgtccttggc

SEQ ID NO: 182561 - DNA, 17 bp, Arabidopsis thaliana
tgcaatagggcctttta

SEQ ID NO: 182562 - DNA, 17 bp, Arabidopsis thaliana
tgcaatcgagcgagcga

SEQ ID NO: 182563 - DNA, 17 bp, Arabidopsis thaliana
tgcaatcgagcgagcgc

SEQ ID NO: 182564 - DNA, 17 bp, Arabidopsis thaliana
tgcaatgccgaggacac

SEQ ID NO: 182565 - DNA, 17 bp, Arabidopsis thaliana
tgcacaccaaaggcgga

SEQ ID NO: 182566 - DNA, 17 bp, Arabidopsis thaliana
tgcacactgatgctgac

SEQ ID NO: 182567 - DNA, 17 bp, Arabidopsis thaliana
tgcacaggtgagaaatc

SEQ ID NO: 182568 - DNA, 17 bp, Arabidopsis thaliana
tgcacatggcggctggt

SEQ ID NO: 182569 - DNA, 17 bp, Arabidopsis thaliana
tgcacatgggttagtcg

SEQ ID NO: 182570 - DNA, 17 bp, Arabidopsis thaliana
tgcaccactatccctcg

SEQ ID NO: 182571 - DNA, 17 bp, Arabidopsis thaliana
tgcaccgtgcgccacca

SEQ ID NO: 182572 - DNA, 17 bp, Arabidopsis thaliana
tgcacctgtcgtgtgac

SEQ ID NO: 182573 - DNA, 17 bp, Arabidopsis thaliana
tgcacgtctgcctgggt

SEQ ID NO: 182574 - DNA, 17 bp, Arabidopsis thaliana
tgcactgccccttccct

SEQ ID NO: 182575 - DNA, 17 bp, Arabidopsis thaliana
tgcactgcctcatccct

SEQ ID NO: 182576 - DNA, 17 bp, Arabidopsis thaliana
tgcactgcctcttccct

SEQ ID NO: 182577 - DNA, 17 bp, Arabidopsis thaliana
tgcactgcctcttctct

SEQ ID NO: 182578 - DNA, 17 bp, Arabidopsis thaliana
tgcactgcctcttcttg

SEQ ID NO: 182579 - DNA, 17 bp, Arabidopsis thaliana
tgcactgccttttccct

SEQ ID NO: 182580 - DNA, 17 bp, Arabidopsis thaliana
tgcactgttatggtagg

SEQ ID NO: 182581 - DNA, 17 bp, Arabidopsis thaliana
tgcacttccacgttata

SEQ ID NO: 182582 - DNA, 17 bp, Arabidopsis thaliana
tgcagaaaaaaagatgt

SEQ ID NO: 182583 - DNA, 17 bp, Arabidopsis thaliana
tgcagaagcagggcacg

SEQ ID NO: 182584 - DNA, 17 bp, Arabidopsis thaliana
tgcagagagaggacata

SEQ ID NO: 182585 - DNA, 17 bp, Arabidopsis thaliana
tgcagatcgtccgccag

SEQ ID NO: 182586 - DNA, 17 bp, Arabidopsis thaliana
tgcagcatctgttttga

SEQ ID NO: 182587 - DNA, 17 bp, Arabidopsis thaliana
tgcagccaaaaccagaa

SEQ ID NO: 182588 - DNA, 17 bp, Arabidopsis thaliana
tgcagccaaggatgact

SEQ ID NO: 182589 - DNA, 17 bp, Arabidopsis thaliana
tgcagcggttcatcgat

SEQ ID NO: 182590 - DNA, 17 bp, Arabidopsis thaliana
tgcagctgccagcatga

SEQ ID NO: 182591 - DNA, 17 bp, Arabidopsis thaliana
tgcaggaaatggaatga

SEQ ID NO: 182592 - DNA, 17 bp, Arabidopsis thaliana
tgcagggaatggaatgg

SEQ ID NO: 182593 - DNA, 17 bp, Arabidopsis thaliana
tgcagggctaataccgc

SEQ ID NO: 182594 - DNA, 17 bp, Arabidopsis thaliana
tgcagggctgataccgc

SEQ ID NO: 182595 - DNA, 17 bp, Arabidopsis thaliana
tgcaggtaggccacata

SEQ ID NO: 182596 - DNA, 17 bp, Arabidopsis thaliana
tgcaggttcaagaacgg

SEQ ID NO: 182597 - DNA, 17 bp, Arabidopsis thaliana
tgcagtcaaggatggct

SEQ ID NO: 182598 - DNA, 17 bp, Arabidopsis thaliana
tgcagtgttgggttaga

SEQ ID NO: 182599 - DNA, 17 bp, Arabidopsis thaliana
tgcagtgttgggttggt

SEQ ID NO: 182600 - DNA, 17 bp, Arabidopsis thaliana
tgcataaacgacaaaca

SEQ ID NO: 182601 - DNA, 17 bp, Arabidopsis thaliana
tgcataacagctacgag

SEQ ID NO: 182602 - DNA, 17 bp, Arabidopsis thaliana
tgcatacagattggtct

SEQ ID NO: 182603 - DNA, 17 bp, Arabidopsis thaliana
tgcatacatccatacat

SEQ ID NO: 182604 - DNA, 17 bp, Arabidopsis thaliana
tgcatagttatccgtaa

SEQ ID NO: 182605 - DNA, 17 bp, Arabidopsis thaliana
tgcatatactcgaatac

SEQ ID NO: 182606 - DNA, 17 bp, Arabidopsis thaliana
tgcatattggtttgtga

SEQ ID NO: 182607 - DNA, 17 bp, Arabidopsis thaliana
tgcatcaatcaatgcgc

SEQ ID NO: 182608 - DNA, 17 bp, Arabidopsis thaliana
tgcatcaatctgtacag

SEQ ID NO: 182609 - DNA, 17 bp, Arabidopsis thaliana
tgcatcctgtagatgga

SEQ ID NO: 182610 - DNA, 17 bp, Arabidopsis thaliana
tgcatcgccatttctat

SEQ ID NO: 182611 - DNA, 17 bp, Arabidopsis thaliana
tgcatcggtaggggagc

SEQ ID NO: 182612 - DNA, 17 bp, Arabidopsis thaliana
tgcatgaccgccaggct

SEQ ID NO: 182613 - DNA, 17 bp, Arabidopsis thaliana
tgcatgactgaggcaga

SEQ ID NO: 182614 - DNA, 17 bp, Arabidopsis thaliana
tgcatggcggaggtcag

SEQ ID NO: 182615 - DNA, 17 bp, Arabidopsis thaliana
tgcatgtgtaagtatga

SEQ ID NO: 182616 - DNA, 17 bp, Arabidopsis thaliana
tgcattcgggacataca

SEQ ID NO: 182617 - DNA, 17 bp, Arabidopsis thaliana
tgcattgaaagtgacta

SEQ ID NO: 182618 - DNA, 17 bp, Arabidopsis thaliana
tgcattgcctcttccct

SEQ ID NO: 182619 - DNA, 17 bp, Arabidopsis thaliana
tgcattggatggatgcc

SEQ ID NO: 182620 - DNA, 17 bp, Arabidopsis thaliana
tgcattggtcggcttgt

SEQ ID NO: 182621 - DNA, 17 bp, Arabidopsis thaliana
tgccaaaagtcgggcga

SEQ ID NO: 182622 - DNA, 17 bp, Arabidopsis thaliana
tgccaaaggagagttgc

SEQ ID NO: 182623 - DNA, 17 bp, Arabidopsis thaliana
tgccaaaggagatttgc

SEQ ID NO: 182624 - DNA, 17 bp, Arabidopsis thaliana
tgccaaagtagagttgc

SEQ ID NO: 182625 - DNA, 17 bp, Arabidopsis thaliana
tgccaaatgtagacaaa

SEQ ID NO: 182626 - DNA, 17 bp, Arabidopsis thaliana
tgccaaggatgacttgc

SEQ ID NO: 182627 - DNA, 17 bp, Arabidopsis thaliana
tgccaataggcctaaca

SEQ ID NO: 182628 - DNA, 17 bp, Arabidopsis thaliana
tgccaatgccaccgcca

SEQ ID NO: 182629 - DNA, 17 bp, Arabidopsis thaliana
tgccaatggattttttt

SEQ ID NO: 182630 - DNA, 17 bp, Arabidopsis thaliana
tgccacaacagatccga

SEQ ID NO: 182631 - DNA, 17 bp, Arabidopsis thaliana
tgccacaagccagttat

SEQ ID NO: 182632 - DNA, 17 bp, Arabidopsis thaliana
tgccacatgtcgcctca

SEQ ID NO: 182633 - DNA, 17 bp, Arabidopsis thaliana
tgccacattatccttgc

SEQ ID NO: 182634 - DNA, 17 bp, Arabidopsis thaliana
tgccaccttggttcgat

SEQ ID NO: 182635 - DNA, 17 bp, Arabidopsis thaliana
tgccacgatccactgag

SEQ ID NO: 182636 - DNA, 17 bp, Arabidopsis thaliana
tgccacgcggcgttgtg

SEQ ID NO: 182637 - DNA, 17 bp, Arabidopsis thaliana
tgccacggtccactgag

SEQ ID NO: 182638 - DNA, 17 bp, Arabidopsis thaliana
tgccactcctatttcct

SEQ ID NO: 182639 - DNA, 17 bp, Arabidopsis thaliana
tgccagattgctccgcc

SEQ ID NO: 182640 - DNA, 17 bp, Arabidopsis thaliana
tgccagcagccgcggta

SEQ ID NO: 182641 - DNA, 17 bp, Arabidopsis thaliana
tgccaggcgtactactt

SEQ ID NO: 182642 - DNA, 17 bp, Arabidopsis thaliana
tgccaggctccctgtat

SEQ ID NO: 182643 - DNA, 17 bp, Arabidopsis thaliana
tgccataacagggcttt

SEQ ID NO: 182644 - DNA, 17 bp, Arabidopsis thaliana
tgccatatctcaggagc

SEQ ID NO: 182645 - DNA, 17 bp, Arabidopsis thaliana
tgccatccattttcggg

SEQ ID NO: 182646 - DNA, 17 bp, Arabidopsis thaliana
tgccatcgtcctgttgc

SEQ ID NO: 182647 - DNA, 17 bp, Arabidopsis thaliana
tgccatcttgagataga

SEQ ID NO: 182648 - DNA, 17 bp, Arabidopsis thaliana
tgccatcttgagattgt

SEQ ID NO: 182649 - DNA, 17 bp, Arabidopsis thaliana
tgcccaaaatggtcgga

SEQ ID NO: 182650 - DNA, 17 bp, Arabidopsis thaliana
tgcccaacgcacctgcc

SEQ ID NO: 182651 - DNA, 17 bp, Arabidopsis thaliana
tgcccaaggataaagaa

SEQ ID NO: 182652 - DNA, 17 bp, Arabidopsis thaliana
tgcccaccctggaaacg

SEQ ID NO: 182653 - DNA, 17 bp, Arabidopsis thaliana
tgcccagtgctctgaat

SEQ ID NO: 182654 - DNA, 17 bp, Arabidopsis thaliana
tgcccatgaccattatc

SEQ ID NO: 182655 - DNA, 17 bp, Arabidopsis thaliana
tgccccagtgagcccag

SEQ ID NO: 182656 - DNA, 17 bp, Arabidopsis thaliana
tgcccgccccacccggt

SEQ ID NO: 182657 - DNA, 17 bp, Arabidopsis thaliana
tgccctagaagcgttga

SEQ ID NO: 182658 - DNA, 17 bp, Arabidopsis thaliana
tgccctatcaactttcg

SEQ ID NO: 182659 - DNA, 17 bp, Arabidopsis thaliana
tgccctattagtaggcc

SEQ ID NO: 182660 - DNA, 17 bp, Arabidopsis thaliana
tgccctccactgcaaga

SEQ ID NO: 182661 - DNA, 17 bp, Arabidopsis thaliana
tgccctccgaccgtctc

SEQ ID NO: 182662 - DNA, 17 bp, Arabidopsis thaliana
tgccctcggccagaagg

SEQ ID NO: 182663 - DNA, 17 bp, Arabidopsis thaliana
tgccctgcgcaaggatg

SEQ ID NO: 182664 - DNA, 17 bp, Arabidopsis thaliana
tgcccttagatgtctgg

SEQ ID NO: 182665 - DNA, 17 bp, Arabidopsis thaliana
tgcccttagatgttctg

SEQ ID NO: 182666 - DNA, 17 bp, Arabidopsis thaliana
tgcccttcggggctcac

SEQ ID NO: 182667 - DNA, 17 bp, Arabidopsis thaliana
tgccctttgtacacacc

SEQ ID NO: 182668 - DNA, 17 bp, Arabidopsis thaliana
tgccgaactgacagtgg

SEQ ID NO: 182669 - DNA, 17 bp, Arabidopsis thaliana
tgccgaagaagccgtac

SEQ ID NO: 182670 - DNA, 17 bp, Arabidopsis thaliana
tgccgaatgtactagcc

SEQ ID NO: 182671 - DNA, 17 bp, Arabidopsis thaliana
tgccgacacggcgaggt

SEQ ID NO: 182672 - DNA, 17 bp, Arabidopsis thaliana
tgccgaccagggatcag

SEQ ID NO: 182673 - DNA, 17 bp, Arabidopsis thaliana
tgccgaccagggatgga

SEQ ID NO: 182674 - DNA, 17 bp, Arabidopsis thaliana
tgccgaccaggggtcag

SEQ ID NO: 182675 - DNA, 17 bp, Arabidopsis thaliana
tgccgaccctcagtagg

SEQ ID NO: 182676 - DNA, 17 bp, Arabidopsis thaliana
tgccgataacaggacgc

SEQ ID NO: 182677 - DNA, 17 bp, Arabidopsis thaliana
tgccgccccagccaaac

SEQ ID NO: 182678 - DNA, 17 bp, Arabidopsis thaliana
tgccgccccagccaaag

SEQ ID NO: 182679 - DNA, 17 bp, Arabidopsis thaliana
tgccgctgaagagatct

SEQ ID NO: 182680 - DNA, 17 bp, Arabidopsis thaliana
tgccggaggatgccctc

SEQ ID NO: 182681 - DNA, 17 bp, Arabidopsis thaliana
tgccggccaggttgttc

SEQ ID NO: 182682 - DNA, 17 bp, Arabidopsis thaliana
tgccggccgggggacgg

SEQ ID NO: 182683 - DNA, 17 bp, Arabidopsis thaliana
tgccgtcaaccgccacg

SEQ ID NO: 182684 - DNA, 17 bp, Arabidopsis thaliana
tgccgtcctgcccatta

SEQ ID NO: 182685 - DNA, 17 bp, Arabidopsis thaliana
tgccgtcgaaaatgaga

SEQ ID NO: 182686 - DNA, 17 bp, Arabidopsis thaliana
tgccgtcgaaaatgagt

SEQ ID NO: 182687 - DNA, 17 bp, Arabidopsis thaliana
tgccgtcgagcccacac

SEQ ID NO: 182688 - DNA, 17 bp, Arabidopsis thaliana
tgccgtcgtctatgaga

SEQ ID NO: 182689 - DNA, 17 bp, Arabidopsis thaliana
tgccgtgatcgatgaat

SEQ ID NO: 182690 - DNA, 17 bp, Arabidopsis thaliana
tgccgttggggaagaat

SEQ ID NO: 182691 - DNA, 17 bp, Arabidopsis thaliana
tgcctagtggaaagacg

SEQ ID NO: 182692 - DNA, 17 bp, Arabidopsis thaliana
tgcctattagctcagtt

SEQ ID NO: 182693 - DNA, 17 bp, Arabidopsis thaliana
tgcctccgaccattttg

SEQ ID NO: 182694 - DNA, 17 bp, Arabidopsis thaliana
tgcctccggcgctgtta

SEQ ID NO: 182695 - DNA, 17 bp, Arabidopsis thaliana
tgcctctgttgctctat

SEQ ID NO: 182696 - DNA, 17 bp, Arabidopsis thaliana
tgcctctgttgttctat

SEQ ID NO: 182697 - DNA, 17 bp, Arabidopsis thaliana
tgcctgactccctgtat

SEQ ID NO: 182698 - DNA, 17 bp, Arabidopsis thaliana
tgcctgagcggattatc

SEQ ID NO: 182699 - DNA, 17 bp, Arabidopsis thaliana
tgcctgataaggatttg

SEQ ID NO: 182700 - DNA, 17 bp, Arabidopsis thaliana
tgcctgcagtttgtctg

SEQ ID NO: 182701 - DNA, 17 bp, Arabidopsis thaliana
tgcctggctccccgtat

SEQ ID NO: 182702 - DNA, 17 bp, Arabidopsis thaliana
tgcctggctccctatat

SEQ ID NO: 182703 - DNA, 17 bp, Arabidopsis thaliana
tgcctggctccctgcct

SEQ ID NO: 182704 - DNA, 17 bp, Arabidopsis thaliana
tgcctggctccctgtac

SEQ ID NO: 182705 - DNA, 17 bp, Arabidopsis thaliana
tgcctggctccctgtat

SEQ ID NO: 182706 - DNA, 17 bp, Arabidopsis thaliana
tgcctggctccctgtct

SEQ ID NO: 182707 - DNA, 17 bp, Arabidopsis thaliana
tgcctggctctctgtat

SEQ ID NO: 182708 - DNA, 17 bp, Arabidopsis thaliana
tgcctgggtgtcacaaa

SEQ ID NO: 182709 - DNA, 17 bp, Arabidopsis thaliana
tgccttcgcagaccatc

SEQ ID NO: 182710 - DNA, 17 bp, Arabidopsis thaliana
tgccttcgggaacgcgg

SEQ ID NO: 182711 - DNA, 17 bp, Arabidopsis thaliana
tgccttcgggtagactc

SEQ ID NO: 182712 - DNA, 17 bp, Arabidopsis thaliana
tgccttgctccctgtat

SEQ ID NO: 182713 - DNA, 17 bp, Arabidopsis thaliana
tgcctttgggagcctaa

SEQ ID NO: 182714 - DNA, 17 bp, Arabidopsis thaliana
tgcgaaacctgacaatt

SEQ ID NO: 182715 - DNA, 17 bp, Arabidopsis thaliana
tgcgaaagcatttgcca

SEQ ID NO: 182716 - DNA, 17 bp, Arabidopsis thaliana
tgcgaaagggtcctgta

SEQ ID NO: 182717 - DNA, 17 bp, Arabidopsis thaliana
tgcgaaattgttgtgtt

SEQ ID NO: 182718 - DNA, 17 bp, Arabidopsis thaliana
tgcgaaggcactgtgaa

SEQ ID NO: 182719 - DNA, 17 bp, Arabidopsis thaliana
tgcgacaattttctgtg

SEQ ID NO: 182720 - DNA, 17 bp, Arabidopsis thaliana
tgcgacagggtccgggc

SEQ ID NO: 182721 - DNA, 17 bp, Arabidopsis thaliana
tgcgaccatctcggcaa

SEQ ID NO: 182722 - DNA, 17 bp, Arabidopsis thaliana
tgcgagaagcatttgca

SEQ ID NO: 182723 - DNA, 17 bp, Arabidopsis thaliana
tgcgagaggcacggggt

SEQ ID NO: 182724 - DNA, 17 bp, Arabidopsis thaliana
tgcgagaggtacgggga

SEQ ID NO: 182725 - DNA, 17 bp, Arabidopsis thaliana
tgcgagaggtcccgcgt

SEQ ID NO: 182726 - DNA, 17 bp, Arabidopsis thaliana
tgcgagatgcgcaggga

SEQ ID NO: 182727 - DNA, 17 bp, Arabidopsis thaliana
tgcgagatgcgcagggt

SEQ ID NO: 182728 - DNA, 17 bp, Arabidopsis thaliana
tgcgataacgaacgaga

SEQ ID NO: 182729 - DNA, 17 bp, Arabidopsis thaliana
tgcgataccgagtcatt

SEQ ID NO: 182730 - DNA, 17 bp, Arabidopsis thaliana
tgcgatacttggtgtga

SEQ ID NO: 182731 - DNA, 17 bp, Arabidopsis thaliana
tgcgatatcgctcttca

SEQ ID NO: 182732 - DNA, 17 bp, Arabidopsis thaliana
tgcgatatgttgcgaag

SEQ ID NO: 182733 - DNA, 17 bp, Arabidopsis thaliana
tgcgatctgagcctggt

SEQ ID NO: 182734 - DNA, 17 bp, Arabidopsis thaliana
tgcgatgcaccggttat

SEQ ID NO: 182735 - DNA, 17 bp, Arabidopsis thaliana
tgcgatggcagccacag

SEQ ID NO: 182736 - DNA, 17 bp, Arabidopsis thaliana
tgcgatggtccctgcgg

SEQ ID NO: 182737 - DNA, 17 bp, Arabidopsis thaliana
tgcgatggttcctgcgg

SEQ ID NO: 182738 - DNA, 17 bp, Arabidopsis thaliana
tgcgattatgttgtctc

SEQ ID NO: 182739 - DNA, 17 bp, Arabidopsis thaliana
tgcgattcttccccaac

SEQ ID NO: 182740 - DNA, 17 bp, Arabidopsis thaliana
tgcgcaaggatgacacg

SEQ ID NO: 182741 - DNA, 17 bp, Arabidopsis thaliana
tgcgcagtcggctggcg

SEQ ID NO: 182742 - DNA, 17 bp, Arabidopsis thaliana
tgcgcccgccgcccgat

SEQ ID NO: 182743 - DNA, 17 bp, Arabidopsis thaliana
tgcgccgctgccacgac

SEQ ID NO: 182744 - DNA, 17 bp, Arabidopsis thaliana
tgcgcgagcatggagcc

SEQ ID NO: 182745 - DNA, 17 bp, Arabidopsis thaliana
tgcgcgatgtgctccgg

SEQ ID NO: 182746 - DNA, 17 bp, Arabidopsis thaliana
tgcgctacaagagccgg

SEQ ID NO: 182747 - DNA, 17 bp, Arabidopsis thaliana
tgcgctccgagtccatt

SEQ ID NO: 182748 - DNA, 17 bp, Arabidopsis thaliana
tgcgctccgagtccgtt

SEQ ID NO: 182749 - DNA, 17 bp, Arabidopsis thaliana
tgcgcttgcagagagaa

SEQ ID NO: 182750 - DNA, 17 bp, Arabidopsis thaliana
tgcggaaaagttgtcga

SEQ ID NO: 182751 - DNA, 17 bp, Arabidopsis thaliana
tgcggaacggagcaatc

SEQ ID NO: 182752 - DNA, 17 bp, Arabidopsis thaliana
tgcggaaggatcattgt

SEQ ID NO: 182753 - DNA, 17 bp, Arabidopsis thaliana
tgcggaggagtgacaac

SEQ ID NO: 182754 - DNA, 17 bp, Arabidopsis thaliana
tgcggcgtggtaaataa

SEQ ID NO: 182755 - DNA, 17 bp, Arabidopsis thaliana
tgcgggaagcatttgca

SEQ ID NO: 182756 - DNA, 17 bp, Arabidopsis thaliana
tgcgggacagggcatcg

SEQ ID NO: 182757 - DNA, 17 bp, Arabidopsis thaliana
tgcgggagaagccaata

SEQ ID NO: 182758 - DNA, 17 bp, Arabidopsis thaliana
tgcgggttcgagtcccg

SEQ ID NO: 182759 - DNA, 17 bp, Arabidopsis thaliana
tgcggtcagccattcaa

SEQ ID NO: 182760 - DNA, 17 bp, Arabidopsis thaliana
tgcggtctcctcgatcc

SEQ ID NO: 182761 - DNA, 17 bp, Arabidopsis thaliana
tgcggttgtggcggcgt

SEQ ID NO: 182762 - DNA, 17 bp, Arabidopsis thaliana
tgcggttttgtgtgaca

SEQ ID NO: 182763 - DNA, 17 bp, Arabidopsis thaliana
tgcgtcccagaaaacga

SEQ ID NO: 182764 - DNA, 17 bp, Arabidopsis thaliana
tgcgtcctatcttcctc

SEQ ID NO: 182765 - DNA, 17 bp, Arabidopsis thaliana
tgcgtcctggtcggatg

SEQ ID NO: 182766 - DNA, 17 bp, Arabidopsis thaliana
tgcgtcctgtagatgga

SEQ ID NO: 182767 - DNA, 17 bp, Arabidopsis thaliana
tgcgtcctgtttgcggt

SEQ ID NO: 182768 - DNA, 17 bp, Arabidopsis thaliana
tgcgtcgccagcacaga

SEQ ID NO: 182769 - DNA, 17 bp, Arabidopsis thaliana
tgcgtcggatgcgaaac

SEQ ID NO: 182770 - DNA, 17 bp, Arabidopsis thaliana
tgcgtgaggctggtttc

SEQ ID NO: 182771 - DNA, 17 bp, Arabidopsis thaliana
tgcgtgggcgaatattt

SEQ ID NO: 182772 - DNA, 17 bp, Arabidopsis thaliana
tgcgtggtaactggtat

SEQ ID NO: 182773 - DNA, 17 bp, Arabidopsis thaliana
tgcgttgaggcgcagca

SEQ ID NO: 182774 - DNA, 17 bp, Arabidopsis thaliana
tgcgttgcctggaggct

SEQ ID NO: 182775 - DNA, 17 bp, Arabidopsis thaliana
tgcgttgttggttgtga

SEQ ID NO: 182776 - DNA, 17 bp, Arabidopsis thaliana
tgcgtttacgctctcga

SEQ ID NO: 182777 - DNA, 17 bp, Arabidopsis thaliana
tgctaaaacactctcca

SEQ ID NO: 182778 - DNA, 17 bp, Arabidopsis thaliana
tgctaacgcaatgtatg

SEQ ID NO: 182779 - DNA, 17 bp, Arabidopsis thaliana
tgctaacgcaatgtgat

SEQ ID NO: 182780 - DNA, 17 bp, Arabidopsis thaliana
tgctaactagctacgta

SEQ ID NO: 182781 - DNA, 17 bp, Arabidopsis thaliana
tgctaagtccaacatag

SEQ ID NO: 182782 - DNA, 17 bp, Arabidopsis thaliana
tgctaatctcgggtgca

SEQ ID NO: 182783 - DNA, 17 bp, Arabidopsis thaliana
tgctacaaggtatgatg

SEQ ID NO: 182784 - DNA, 17 bp, Arabidopsis thaliana
tgctaccctgtacctgg

SEQ ID NO: 182785 - DNA, 17 bp, Arabidopsis thaliana
tgctaccggtgaattgg

SEQ ID NO: 182786 - DNA, 17 bp, Arabidopsis thaliana
tgctactctgtattgta

SEQ ID NO: 182787 - DNA, 17 bp, Arabidopsis thaliana
tgctacttcattggaaa

SEQ ID NO: 182788 - DNA, 17 bp, Arabidopsis thaliana
tgctaggcggactacta

SEQ ID NO: 182789 - DNA, 17 bp, Arabidopsis thaliana
tgctaggcggactactt

SEQ ID NO: 182790 - DNA, 17 bp, Arabidopsis thaliana
tgctatcgggagaatga

SEQ ID NO: 182791 - DNA, 17 bp, Arabidopsis thaliana
tgctatgttggacttag

SEQ ID NO: 182792 - DNA, 17 bp, Arabidopsis thaliana
tgctattttgaaaagca

SEQ ID NO: 182793 - DNA, 17 bp, Arabidopsis thaliana
tgctattttgaaaagct

SEQ ID NO: 182794 - DNA, 17 bp, Arabidopsis thaliana
tgctcaaagcaagccta

SEQ ID NO: 182795 - DNA, 17 bp, Arabidopsis thaliana
tgctcaacaagatggaa

SEQ ID NO: 182796 - DNA, 17 bp, Arabidopsis thaliana
tgctcacaggggtagtt

SEQ ID NO: 182797 - DNA, 17 bp, Arabidopsis thaliana
tgctcacctctctttct

SEQ ID NO: 182798 - DNA, 17 bp, Arabidopsis thaliana
tgctcactgctctatct

SEQ ID NO: 182799 - DNA, 17 bp, Arabidopsis thaliana
tgctcagctgtatttgc

SEQ ID NO: 182800 - DNA, 17 bp, Arabidopsis thaliana
tgctcatggggatgtta

SEQ ID NO: 182801 - DNA, 17 bp, Arabidopsis thaliana
tgctcattttgttatta

SEQ ID NO: 182802 - DNA, 17 bp, Arabidopsis thaliana
tgctcattttgttattt

SEQ ID NO: 182803 - DNA, 17 bp, Arabidopsis thaliana
tgctcattttgttgttt

SEQ ID NO: 182804 - DNA, 17 bp, Arabidopsis thaliana
tgctccaccgttctcac

SEQ ID NO: 182805 - DNA, 17 bp, Arabidopsis thaliana
tgctcccattcgattgc

SEQ ID NO: 182806 - DNA, 17 bp, Arabidopsis thaliana
tgctccgccacgttatc

SEQ ID NO: 182807 - DNA, 17 bp, Arabidopsis thaliana
tgctcgcaggtggatgg

SEQ ID NO: 182808 - DNA, 17 bp, Arabidopsis thaliana
tgctcgcctctgttctg

SEQ ID NO: 182809 - DNA, 17 bp, Arabidopsis thaliana
tgctcggtcgcgccgct

SEQ ID NO: 182810 - DNA, 17 bp, Arabidopsis thaliana
tgctcgttaggtttgaa

SEQ ID NO: 182811 - DNA, 17 bp, Arabidopsis thaliana
tgctctccatcccattt

SEQ ID NO: 182812 - DNA, 17 bp, Arabidopsis thaliana
tgctctgatgattcatg

SEQ ID NO: 182813 - DNA, 17 bp, Arabidopsis thaliana
tgctctgcacggctgat

SEQ ID NO: 182814 - DNA, 17 bp, Arabidopsis thaliana
tgctctgctaggcggac

SEQ ID NO: 182815 - DNA, 17 bp, Arabidopsis thaliana
tgctcttgctttggctg

SEQ ID NO: 182816 - DNA, 17 bp, Arabidopsis thaliana
tgctctttgttatttga

SEQ ID NO: 182817 - DNA, 17 bp, Arabidopsis thaliana
tgctcttttgattttgc

SEQ ID NO: 182818 - DNA, 17 bp, Arabidopsis thaliana
tgctgaaaggagtgggt

SEQ ID NO: 182819 - DNA, 17 bp, Arabidopsis thaliana
tgctgacgttgagcccc

SEQ ID NO: 182820 - DNA, 17 bp, Arabidopsis thaliana
tgctgcaactcttgcgg

SEQ ID NO: 182821 - DNA, 17 bp, Arabidopsis thaliana
tgctgcgctcctgatcc

SEQ ID NO: 182822 - DNA, 17 bp, Arabidopsis thaliana
tgctgcgcttgcggtgg

SEQ ID NO: 182823 - DNA, 17 bp, Arabidopsis thaliana
tgctgctcagctgtatt

SEQ ID NO: 182824 - DNA, 17 bp, Arabidopsis thaliana
tgctgcttgattgtgct

SEQ ID NO: 182825 - DNA, 17 bp, Arabidopsis thaliana
tgctggactgcggaaca

SEQ ID NO: 182826 - DNA, 17 bp, Arabidopsis thaliana
tgctggcatggtggtga

SEQ ID NO: 182827 - DNA, 17 bp, Arabidopsis thaliana
tgctggctccggtgcgc

SEQ ID NO: 182828 - DNA, 17 bp, Arabidopsis thaliana
tgctgggattcgagccc

SEQ ID NO: 182829 - DNA, 17 bp, Arabidopsis thaliana
tgctggtccgatctcat

SEQ ID NO: 182830 - DNA, 17 bp, Arabidopsis thaliana
tgctggtccgatttcat

SEQ ID NO: 182831 - DNA, 17 bp, Arabidopsis thaliana
tgctggtcggcgtcgaa

SEQ ID NO: 182832 - DNA, 17 bp, Arabidopsis thaliana
tgctggtctagagattg

SEQ ID NO: 182833 - DNA, 17 bp, Arabidopsis thaliana
tgctggtgctggcggta

SEQ ID NO: 182834 - DNA, 17 bp, Arabidopsis thaliana
tgctgtcaagatgtact

SEQ ID NO: 182835 - DNA, 17 bp, Arabidopsis thaliana
tgctgttgagagatgat

SEQ ID NO: 182836 - DNA, 17 bp, Arabidopsis thaliana
tgcttaaatctctgtga

SEQ ID NO: 182837 - DNA, 17 bp, Arabidopsis thaliana
tgcttacaggtttgttc

SEQ ID NO: 182838 - DNA, 17 bp, Arabidopsis thaliana
tgcttacgctggatgga

SEQ ID NO: 182839 - DNA, 17 bp, Arabidopsis thaliana
tgcttagtggaaagacg

SEQ ID NO: 182840 - DNA, 17 bp, Arabidopsis thaliana
tgcttataggactccgc

SEQ ID NO: 182841 - DNA, 17 bp, Arabidopsis thaliana
tgcttcaactgtgattt

SEQ ID NO: 182842 - DNA, 17 bp, Arabidopsis thaliana
tgcttccggatatcaca

SEQ ID NO: 182843 - DNA, 17 bp, Arabidopsis thaliana
tgcttcctcgaccaagg

SEQ ID NO: 182844 - DNA, 17 bp, Arabidopsis thaliana
tgcttctcgactactca

SEQ ID NO: 182845 - DNA, 17 bp, Arabidopsis thaliana
tgcttctgaagctctgt

SEQ ID NO: 182846 - DNA, 17 bp, Arabidopsis thaliana
tgcttctgattcattgt

SEQ ID NO: 182847 - DNA, 17 bp, Arabidopsis thaliana
tgcttgactctagtccg

SEQ ID NO: 182848 - DNA, 17 bp, Arabidopsis thaliana
tgcttgaggatctaaat

SEQ ID NO: 182849 - DNA, 17 bp, Arabidopsis thaliana
tgcttggctccctgtat

SEQ ID NO: 182850 - DNA, 17 bp, Arabidopsis thaliana
tgcttgggcgagagtag

SEQ ID NO: 182851 - DNA, 17 bp, Arabidopsis thaliana
tgcttgtcctctccatg

SEQ ID NO: 182852 - DNA, 17 bp, Arabidopsis thaliana
tgcttgtctcaaagatt

SEQ ID NO: 182853 - DNA, 17 bp, Arabidopsis thaliana
tgcttgtgactgcttgg

SEQ ID NO: 182854 - DNA, 17 bp, Arabidopsis thaliana
tgcttgtggactgcttg

SEQ ID NO: 182855 - DNA, 17 bp, Arabidopsis thaliana
tgctttccggtggcaga

SEQ ID NO: 182856 - DNA, 17 bp, Arabidopsis thaliana
tgctttcgaacagagtt

SEQ ID NO: 182857 - DNA, 17 bp, Arabidopsis thaliana
tgctttgaatggtaatg

SEQ ID NO: 182858 - DNA, 17 bp, Arabidopsis thaliana
tgctttgactgtctgct

SEQ ID NO: 182859 - DNA, 17 bp, Arabidopsis thaliana
tgcttttctatggggtc

SEQ ID NO: 182860 - DNA, 17 bp, Arabidopsis thaliana
tgctttttctagtttcg

SEQ ID NO: 182861 - DNA, 17 bp, Arabidopsis thaliana
tgctttttgatccttcg

SEQ ID NO: 182862 - DNA, 17 bp, Arabidopsis thaliana
tggaaaaaagcaaaaag

SEQ ID NO: 182863 - DNA, 17 bp, Arabidopsis thaliana
tggaaaacatgattagg

SEQ ID NO: 182864 - DNA, 17 bp, Arabidopsis thaliana
tggaaacggtctttggg

SEQ ID NO: 182865 - DNA, 17 bp, Arabidopsis thaliana
tggaaactacacgggtt

SEQ ID NO: 182866 - DNA, 17 bp, Arabidopsis thaliana
tggaaatgttgttgcct

SEQ ID NO: 182867 - DNA, 17 bp, Arabidopsis thaliana
tggaacagcttactacc

SEQ ID NO: 182868 - DNA, 17 bp, Arabidopsis thaliana
tggaacaggcaggcgat

SEQ ID NO: 182869 - DNA, 17 bp, Arabidopsis thaliana
tggaacagtttgtgttt

SEQ ID NO: 182870 - DNA, 17 bp, Arabidopsis thaliana
tggaaccaggcgggtcc

SEQ ID NO: 182871 - DNA, 17 bp, Arabidopsis thaliana
tggaagaaggtgagact

SEQ ID NO: 182872 - DNA, 17 bp, Arabidopsis thaliana
tggaagactatgggtgc

SEQ ID NO: 182873 - DNA, 17 bp, Arabidopsis thaliana
tggaagagcaccgcacg

SEQ ID NO: 182874 - DNA, 17 bp, Arabidopsis thaliana
tggaagaggacttggaa

SEQ ID NO: 182875 - DNA, 17 bp, Arabidopsis thaliana
tggaagaggttcgccgg

SEQ ID NO: 182876 - DNA, 17 bp, Arabidopsis thaliana
tggaagatactgcaaca

SEQ ID NO: 182877 - DNA, 17 bp, Arabidopsis thaliana
tggaagatgctttggga

SEQ ID NO: 182878 - DNA, 17 bp, Arabidopsis thaliana
tggaagatgttcgccgg

SEQ ID NO: 182879 - DNA, 17 bp, Arabidopsis thaliana
tggaaggtctgccgtct

SEQ ID NO: 182880 - DNA, 17 bp, Arabidopsis thaliana
tggaaggtgcggctgga

SEQ ID NO: 182881 - DNA, 17 bp, Arabidopsis thaliana
tggaagtgcaaaaagga

SEQ ID NO: 182882 - DNA, 17 bp, Arabidopsis thaliana
tggaagtgcaaaaaggc

SEQ ID NO: 182883 - DNA, 17 bp, Arabidopsis thaliana
tggaatactcgaactac

SEQ ID NO: 182884 - DNA, 17 bp, Arabidopsis thaliana
tggaatactctggatac

SEQ ID NO: 182885 - DNA, 17 bp, Arabidopsis thaliana
tggaatacttgaactac

SEQ ID NO: 182886 - DNA, 17 bp, Arabidopsis thaliana
tggaatagtaaactaaa

SEQ ID NO: 182887 - DNA, 17 bp, Arabidopsis thaliana
tggaatatcggagtagg

SEQ ID NO: 182888 - DNA, 17 bp, Arabidopsis thaliana
tggaatatgtccaatgt

SEQ ID NO: 182889 - DNA, 17 bp, Arabidopsis thaliana
tggaatatttccaatgt

SEQ ID NO: 182890 - DNA, 17 bp, Arabidopsis thaliana
tggaattaccgcggctg

SEQ ID NO: 182891 - DNA, 17 bp, Arabidopsis thaliana
tggaattttcgtgttgg

SEQ ID NO: 182892 - DNA, 17 bp, Arabidopsis thaliana
tggacaaggttagattt

SEQ ID NO: 182893 - DNA, 17 bp, Arabidopsis thaliana
tggacaatgaatcagaa

SEQ ID NO: 182894 - DNA, 17 bp, Arabidopsis thaliana
tggacaatgaatcgaag

SEQ ID NO: 182895 - DNA, 17 bp, Arabidopsis thaliana
tggacagcgggtttcgg

SEQ ID NO: 182896 - DNA, 17 bp, Arabidopsis thaliana
tggaccatttgtgagaa

SEQ ID NO: 182897 - DNA, 17 bp, Arabidopsis thaliana
tggaccctacctccggc

SEQ ID NO: 182898 - DNA, 17 bp, Arabidopsis thaliana
tggaccgaacgccaacg

SEQ ID NO: 182899 - DNA, 17 bp, Arabidopsis thaliana
tggaccgacgcgaatta

SEQ ID NO: 182900 - DNA, 17 bp, Arabidopsis thaliana
tggaccgacgcggatta

SEQ ID NO: 182901 - DNA, 17 bp, Arabidopsis thaliana
tggacctggacctggat

SEQ ID NO: 182902 - DNA, 17 bp, Arabidopsis thaliana
tggacctggtgagtttc

SEQ ID NO: 182903 - DNA, 17 bp, Arabidopsis thaliana
tggacgagccaccatca

SEQ ID NO: 182904 - DNA, 17 bp, Arabidopsis thaliana
tggacgcggaggcatta

SEQ ID NO: 182905 - DNA, 17 bp, Arabidopsis thaliana
tggacgctcatcagaca

SEQ ID NO: 182906 - DNA, 17 bp, Arabidopsis thaliana
tggacggatcacagttt

SEQ ID NO: 182907 - DNA, 17 bp, Arabidopsis thaliana
tggacggatcacggttt

SEQ ID NO: 182908 - DNA, 17 bp, Arabidopsis thaliana
tggacggcagatccaag

SEQ ID NO: 182909 - DNA, 17 bp, Arabidopsis thaliana
tggacggggtcaactcg

SEQ ID NO: 182910 - DNA, 17 bp, Arabidopsis thaliana
tggactaaagctttgga

SEQ ID NO: 182911 - DNA, 17 bp, Arabidopsis thaliana
tggactagatcagtctt

SEQ ID NO: 182912 - DNA, 17 bp, Arabidopsis thaliana
tggactagatcagtttg

SEQ ID NO: 182913 - DNA, 17 bp, Arabidopsis thaliana
tggactagctgtaccta

SEQ ID NO: 182914 - DNA, 17 bp, Arabidopsis thaliana
tggactatgaatggggt

SEQ ID NO: 182915 - DNA, 17 bp, Arabidopsis thaliana
tggactcgcaaaatgca

SEQ ID NO: 182916 - DNA, 17 bp, Arabidopsis thaliana
tggactggttggggtcg

SEQ ID NO: 182917 - DNA, 17 bp, Arabidopsis thaliana
tggactgttacatctct

SEQ ID NO: 182918 - DNA, 17 bp, Arabidopsis thaliana
tggacttagaatatgct

SEQ ID NO: 182919 - DNA, 17 bp, Arabidopsis thaliana
tggacttgatctacctg

SEQ ID NO: 182920 - DNA, 17 bp, Arabidopsis thaliana
tggacttgctccgattt

SEQ ID NO: 182921 - DNA, 17 bp, Arabidopsis thaliana
tggactttgtaaaaatg

SEQ ID NO: 182922 - DNA, 17 bp, Arabidopsis thaliana
tggactttttggtcaat

SEQ ID NO: 182923 - DNA, 17 bp, Arabidopsis thaliana
tggagaaagaagagcga

SEQ ID NO: 182924 - DNA, 17 bp, Arabidopsis thaliana
tggagaacaaactggta

SEQ ID NO: 182925 - DNA, 17 bp, Arabidopsis thaliana
tggagaacgtttctata

SEQ ID NO: 182926 - DNA, 17 bp, Arabidopsis thaliana
tggagaagcagcgcacg

SEQ ID NO: 182927 - DNA, 17 bp, Arabidopsis thaliana
tggagaagcaggacacg

SEQ ID NO: 182928 - DNA, 17 bp, Arabidopsis thaliana
tggagaagcagggcaag

SEQ ID NO: 182929 - DNA, 17 bp, Arabidopsis thaliana
tggagaagcagggcaca

SEQ ID NO: 182930 - DNA, 17 bp, Arabidopsis thaliana
tggagaagcagggcacg

SEQ ID NO: 182931 - DNA, 17 bp, Arabidopsis thaliana
tggagaagcagggcagg

SEQ ID NO: 182932 - DNA, 17 bp, Arabidopsis thaliana
tggagaagcagggcatg

SEQ ID NO: 182933 - DNA, 17 bp, Arabidopsis thaliana
tggagaagcagggcgcg

SEQ ID NO: 182934 - DNA, 17 bp, Arabidopsis thaliana
tggagaagcagggcggg

SEQ ID NO: 182935 - DNA, 17 bp, Arabidopsis thaliana
tggagaagcagggtacg

SEQ ID NO: 182936 - DNA, 17 bp, Arabidopsis thaliana
tggagaagcaggtcacg

SEQ ID NO: 182937 - DNA, 17 bp, Arabidopsis thaliana
tggagaagcatggcacg

SEQ ID NO: 182938 - DNA, 17 bp, Arabidopsis thaliana
tggagacaataagggga

SEQ ID NO: 182939 - DNA, 17 bp, Arabidopsis thaliana
tggagacgtcgctgccg

SEQ ID NO: 182940 - DNA, 17 bp, Arabidopsis thaliana
tggagcctgcggcttaa

SEQ ID NO: 182941 - DNA, 17 bp, Arabidopsis thaliana
tggagcgatttgtctgg

SEQ ID NO: 182942 - DNA, 17 bp, Arabidopsis thaliana
tggagcgtaccgacatg

SEQ ID NO: 182943 - DNA, 17 bp, Arabidopsis thaliana
tggaggaaacggcgcaa

SEQ ID NO: 182944 - DNA, 17 bp, Arabidopsis thaliana
tggaggagcagggcacg

SEQ ID NO: 182945 - DNA, 17 bp, Arabidopsis thaliana
tggaggattcatgtttg

SEQ ID NO: 182946 - DNA, 17 bp, Arabidopsis thaliana
tggaggcacgtcttcgc

SEQ ID NO: 182947 - DNA, 17 bp, Arabidopsis thaliana
tggaggcagcggttcat

SEQ ID NO: 182948 - DNA, 17 bp, Arabidopsis thaliana
tggaggcagcggttcct

SEQ ID NO: 182949 - DNA, 17 bp, Arabidopsis thaliana
tggaggctcgcagcggt

SEQ ID NO: 182950 - DNA, 17 bp, Arabidopsis thaliana
tggagggagcaggattc

SEQ ID NO: 182951 - DNA, 17 bp, Arabidopsis thaliana
tggagggcaatgcgtga

SEQ ID NO: 182952 - DNA, 17 bp, Arabidopsis thaliana
tggagtatagccaagta

SEQ ID NO: 182953 - DNA, 17 bp, Arabidopsis thaliana
tggagtatagccaagtg

SEQ ID NO: 182954 - DNA, 17 bp, Arabidopsis thaliana
tggagtccggctttgtg

SEQ ID NO: 182955 - DNA, 17 bp, Arabidopsis thaliana
tggagtcgcaccagggt

SEQ ID NO: 182956 - DNA, 17 bp, Arabidopsis thaliana
tggagtgcagaaatgaa

SEQ ID NO: 182957 - DNA, 17 bp, Arabidopsis thaliana
tggagtggattccaatg

SEQ ID NO: 182958 - DNA, 17 bp, Arabidopsis thaliana
tggagttctctttacac

SEQ ID NO: 182959 - DNA, 17 bp, Arabidopsis thaliana
tggagtttgccataatc

SEQ ID NO: 182960 - DNA, 17 bp, Arabidopsis thaliana
tggatcaaaattttcct

SEQ ID NO: 182961 - DNA, 17 bp, Arabidopsis thaliana
tggatcccggcatttag

SEQ ID NO: 182962 - DNA, 17 bp, Arabidopsis thaliana
tggatccgcatcctgta

SEQ ID NO: 182963 - DNA, 17 bp, Arabidopsis thaliana
tggatcgcatcctgtag

SEQ ID NO: 182964 - DNA, 17 bp, Arabidopsis thaliana
tggatcgggtatgcgcg

SEQ ID NO: 182965 - DNA, 17 bp, Arabidopsis thaliana
tggatcgtgatctatct

SEQ ID NO: 182966 - DNA, 17 bp, Arabidopsis thaliana
tggatcgtggcagcaag

SEQ ID NO: 182967 - DNA, 17 bp, Arabidopsis thaliana
tggatctgaaagtgact

SEQ ID NO: 182968 - DNA, 17 bp, Arabidopsis thaliana
tggatcttacattacaa

SEQ ID NO: 182969 - DNA, 17 bp, Arabidopsis thaliana
tggatcttagaaaatta

SEQ ID NO: 182970 - DNA, 17 bp, Arabidopsis thaliana
tggatgctgctcagctg

SEQ ID NO: 182971 - DNA, 17 bp, Arabidopsis thaliana
tggatgtggtccttgat

SEQ ID NO: 182972 - DNA, 17 bp, Arabidopsis thaliana
tggatgtggtcgttcta

SEQ ID NO: 182973 - DNA, 17 bp, Arabidopsis thaliana
tggattagattgtggcg

SEQ ID NO: 182974 - DNA, 17 bp, Arabidopsis thaliana
tggattaggtggtgcgg

SEQ ID NO: 182975 - DNA, 17 bp, Arabidopsis thaliana
tggattatgactgaacg

SEQ ID NO: 182976 - DNA, 17 bp, Arabidopsis thaliana
tggattcatagcggcct

SEQ ID NO: 182977 - DNA, 17 bp, Arabidopsis thaliana
tggattgaagggagctc

SEQ ID NO: 182978 - DNA, 17 bp, Arabidopsis thaliana
tggattgcatatctcag

SEQ ID NO: 182979 - DNA, 17 bp, Arabidopsis thaliana
tggattggtcaagggaa

SEQ ID NO: 182980 - DNA, 17 bp, Arabidopsis thaliana
tggatttatgattcacc

SEQ ID NO: 182981 - DNA, 17 bp, Arabidopsis thaliana
tggatttattcaggaca

SEQ ID NO: 182982 - DNA, 17 bp, Arabidopsis thaliana
tggatttgatgttgttt

SEQ ID NO: 182983 - DNA, 17 bp, Arabidopsis thaliana
tggattttttacaaata

SEQ ID NO: 182984 - DNA, 17 bp, Arabidopsis thaliana
tggatttttttcttaaa

SEQ ID NO: 182985 - DNA, 17 bp, Arabidopsis thaliana
tggattttttttcataa

SEQ ID NO: 182986 - DNA, 17 bp, Arabidopsis thaliana
tggattttttttcatat

SEQ ID NO: 182987 - DNA, 17 bp, Arabidopsis thaliana
tggcaaggataacccga

SEQ ID NO: 182988 - DNA, 17 bp, Arabidopsis thaliana
tggcaaggataacccgg

SEQ ID NO: 182989 - DNA, 17 bp, Arabidopsis thaliana
tggcaagttgtccttcg

SEQ ID NO: 182990 - DNA, 17 bp, Arabidopsis thaliana
tggcagaggatttatta

SEQ ID NO: 182991 - DNA, 17 bp, Arabidopsis thaliana
tggcagagtggccttgc

SEQ ID NO: 182992 - DNA, 17 bp, Arabidopsis thaliana
tggcagagttgccttgc

SEQ ID NO: 182993 - DNA, 17 bp, Arabidopsis thaliana
tggcagcaacaggacga

SEQ ID NO: 182994 - DNA, 17 bp, Arabidopsis thaliana
tggcagcggcgcaggat

SEQ ID NO: 182995 - DNA, 17 bp, Arabidopsis thaliana
tggcaggcctttgttag

SEQ ID NO: 182996 - DNA, 17 bp, Arabidopsis thaliana
tggcaggggctcaacga

SEQ ID NO: 182997 - DNA, 17 bp, Arabidopsis thaliana
tggcaggtcggtggaca

SEQ ID NO: 182998 - DNA, 17 bp, Arabidopsis thaliana
tggcagtctctttggct

SEQ ID NO: 182999 - DNA, 17 bp, Arabidopsis thaliana
tggcagtgatgactcgg

SEQ ID NO: 183000 - DNA, 17 bp, Arabidopsis thaliana
tggcatggtggtgacga

SEQ ID NO: 183001 - DNA, 17 bp, Arabidopsis thaliana
tggcatgtgatacagag

SEQ ID NO: 183002 - DNA, 17 bp, Arabidopsis thaliana
tggcattggttcttcat

SEQ ID NO: 183003 - DNA, 17 bp, Arabidopsis thaliana
tggcattgttactccgg

SEQ ID NO: 183004 - DNA, 17 bp, Arabidopsis thaliana
tggcattttcagatcga

SEQ ID NO: 183005 - DNA, 17 bp, Arabidopsis thaliana
tggccaaggatgacttg

SEQ ID NO: 183006 - DNA, 17 bp, Arabidopsis thaliana
tggccaaggtctccgcg

SEQ ID NO: 183007 - DNA, 17 bp, Arabidopsis thaliana
tggccactacattcccg

SEQ ID NO: 183008 - DNA, 17 bp, Arabidopsis thaliana
tggccagccgtggtgac

SEQ ID NO: 183009 - DNA, 17 bp, Arabidopsis thaliana
tggccaggtagtcagcc

SEQ ID NO: 183010 - DNA, 17 bp, Arabidopsis thaliana
tggccatagatttgtca

SEQ ID NO: 183011 - DNA, 17 bp, Arabidopsis thaliana
tggccatggaagtcgga

SEQ ID NO: 183012 - DNA, 17 bp, Arabidopsis thaliana
tggccatggttccggtt

SEQ ID NO: 183013 - DNA, 17 bp, Arabidopsis thaliana
tggccatggttgtaggg

SEQ ID NO: 183014 - DNA, 17 bp, Arabidopsis thaliana
tggccccccggcccgag

SEQ ID NO: 183015 - DNA, 17 bp, Arabidopsis thaliana
tggcccctgcgcaagga

SEQ ID NO: 183016 - DNA, 17 bp, Arabidopsis thaliana
tggcccgagcaacataa

SEQ ID NO: 183017 - DNA, 17 bp, Arabidopsis thaliana
tggcccgcacttggagg

SEQ ID NO: 183018 - DNA, 17 bp, Arabidopsis thaliana
tggcccgctggttcgat

SEQ ID NO: 183019 - DNA, 17 bp, Arabidopsis thaliana
tggcccgggatggtggc

SEQ ID NO: 183020 - DNA, 17 bp, Arabidopsis thaliana
tggccctgccactggcg

SEQ ID NO: 183021 - DNA, 17 bp, Arabidopsis thaliana
tggccgaagatcttggg

SEQ ID NO: 183022 - DNA, 17 bp, Arabidopsis thaliana
tggccgaagtcgaaagc

SEQ ID NO: 183023 - DNA, 17 bp, Arabidopsis thaliana
tggccgacaggcccggg

SEQ ID NO: 183024 - DNA, 17 bp, Arabidopsis thaliana
tggccgagcatgcacac

SEQ ID NO: 183025 - DNA, 17 bp, Arabidopsis thaliana
tggccgagtggtaaaaa

SEQ ID NO: 183026 - DNA, 17 bp, Arabidopsis thaliana
tggccgagttggtctaa

SEQ ID NO: 183027 - DNA, 17 bp, Arabidopsis thaliana
tggccgttcttagttgg

SEQ ID NO: 183028 - DNA, 17 bp, Arabidopsis thaliana
tggcctaccatggtggt

SEQ ID NO: 183029 - DNA, 17 bp, Arabidopsis thaliana
tggcctacctgcaagat

SEQ ID NO: 183030 - DNA, 17 bp, Arabidopsis thaliana
tggcctagagtacgaag

SEQ ID NO: 183031 - DNA, 17 bp, Arabidopsis thaliana
tggcctaggctagtgac

SEQ ID NO: 183032 - DNA, 17 bp, Arabidopsis thaliana
tggcctcacatcaatat

SEQ ID NO: 183033 - DNA, 17 bp, Arabidopsis thaliana
tggcctctgtgctggcg

SEQ ID NO: 183034 - DNA, 17 bp, Arabidopsis thaliana
tggcctgaaaggacaca

SEQ ID NO: 183035 - DNA, 17 bp, Arabidopsis thaliana
tggcctgtacagtctac

SEQ ID NO: 183036 - DNA, 17 bp, Arabidopsis thaliana
tggcctgtttactttag

SEQ ID NO: 183037 - DNA, 17 bp, Arabidopsis thaliana
tggccttactcaatatc

SEQ ID NO: 183038 - DNA, 17 bp, Arabidopsis thaliana
tggccttcgggatcgga

SEQ ID NO: 183039 - DNA, 17 bp, Arabidopsis thaliana
tggccttgtcatctcaa

SEQ ID NO: 183040 - DNA, 17 bp, Arabidopsis thaliana
tggccttttgcatgtaa

SEQ ID NO: 183041 - DNA, 17 bp, Arabidopsis thaliana
tggcgaagattaccgtg

SEQ ID NO: 183042 - DNA, 17 bp, Arabidopsis thaliana
tggcgaagcggcggagg

SEQ ID NO: 183043 - DNA, 17 bp, Arabidopsis thaliana
tggcgaaggcgatagtc

SEQ ID NO: 183044 - DNA, 17 bp, Arabidopsis thaliana
tggcgaggagtgcggta

SEQ ID NO: 183045 - DNA, 17 bp, Arabidopsis thaliana
tggcgaggagtgcggtt

SEQ ID NO: 183046 - DNA, 17 bp, Arabidopsis thaliana
tggcgattgctgagcgt

SEQ ID NO: 183047 - DNA, 17 bp, Arabidopsis thaliana
tggcgcaaacccttgta

SEQ ID NO: 183048 - DNA, 17 bp, Arabidopsis thaliana
tggcgctatccatcctg

SEQ ID NO: 183049 - DNA, 17 bp, Arabidopsis thaliana
tggcgctatccctcctg

SEQ ID NO: 183050 - DNA, 17 bp, Arabidopsis thaliana
tggcggaccatctccag

SEQ ID NO: 183051 - DNA, 17 bp, Arabidopsis thaliana
tggcggaccatttccag

SEQ ID NO: 183052 - DNA, 17 bp, Arabidopsis thaliana
tggcggacgatctgcag

SEQ ID NO: 183053 - DNA, 17 bp, Arabidopsis thaliana
tggcgggcaggtcgttg

SEQ ID NO: 183054 - DNA, 17 bp, Arabidopsis thaliana
tggcggtagcggttatc

SEQ ID NO: 183055 - DNA, 17 bp, Arabidopsis thaliana
tggcggtcggcgcctgt

SEQ ID NO: 183056 - DNA, 17 bp, Arabidopsis thaliana
tggcggtgcaggttgtt

SEQ ID NO: 183057 - DNA, 17 bp, Arabidopsis thaliana
tggcgtccattaccaat

SEQ ID NO: 183058 - DNA, 17 bp, Arabidopsis thaliana
tggcgttcggtccaggt

SEQ ID NO: 183059 - DNA, 17 bp, Arabidopsis thaliana
tggcgttcttcggccca

SEQ ID NO: 183060 - DNA, 17 bp, Arabidopsis thaliana
tggcgttttccctgctg

SEQ ID NO: 183061 - DNA, 17 bp, Arabidopsis thaliana
tggcgttttctctgctg

SEQ ID NO: 183062 - DNA, 17 bp, Arabidopsis thaliana
tggctaaccttgagtcc

SEQ ID NO: 183063 - DNA, 17 bp, Arabidopsis thaliana
tggctaagtccgctcgg

SEQ ID NO: 183064 - DNA, 17 bp, Arabidopsis thaliana
tggctaagtccgttcgg

SEQ ID NO: 183065 - DNA, 17 bp, Arabidopsis thaliana
tggctacaaacgaccga

SEQ ID NO: 183066 - DNA, 17 bp, Arabidopsis thaliana
tggctacggcattcggt

SEQ ID NO: 183067 - DNA, 17 bp, Arabidopsis thaliana
tggctactcccaaacat

SEQ ID NO: 183068 - DNA, 17 bp, Arabidopsis thaliana
tggctataccgcttgtg

SEQ ID NO: 183069 - DNA, 17 bp, Arabidopsis thaliana
tggctatcagttgcttg

SEQ ID NO: 183070 - DNA, 17 bp, Arabidopsis thaliana
tggctatccgatcacca

SEQ ID NO: 183071 - DNA, 17 bp, Arabidopsis thaliana
tggctcaggcggttctt

SEQ ID NO: 183072 - DNA, 17 bp, Arabidopsis thaliana
tggctcgccctctggac

SEQ ID NO: 183073 - DNA, 17 bp, Arabidopsis thaliana
tggctcggattcgtccg

SEQ ID NO: 183074 - DNA, 17 bp, Arabidopsis thaliana
tggctcttgcggtaacc

SEQ ID NO: 183075 - DNA, 17 bp, Arabidopsis thaliana
tggctgaagtagccagc

SEQ ID NO: 183076 - DNA, 17 bp, Arabidopsis thaliana
tggctgaccgcagagtt

SEQ ID NO: 183077 - DNA, 17 bp, Arabidopsis thaliana
tggctgctgtggcatca

SEQ ID NO: 183078 - DNA, 17 bp, Arabidopsis thaliana
tggctgggttttgggat

SEQ ID NO: 183079 - DNA, 17 bp, Arabidopsis thaliana
tggctgtccttcaggtc

SEQ ID NO: 183080 - DNA, 17 bp, Arabidopsis thaliana
tggctgtttgggtaact

SEQ ID NO: 183081 - DNA, 17 bp, Arabidopsis thaliana
tggcttaaccggattgg

SEQ ID NO: 183082 - DNA, 17 bp, Arabidopsis thaliana
tggcttaccgcaagagt

SEQ ID NO: 183083 - DNA, 17 bp, Arabidopsis thaliana
tggcttcgaacattggt

SEQ ID NO: 183084 - DNA, 17 bp, Arabidopsis thaliana
tggcttcgttcgtctga

SEQ ID NO: 183085 - DNA, 17 bp, Arabidopsis thaliana
tggcttctaccgcaaga

SEQ ID NO: 183086 - DNA, 17 bp, Arabidopsis thaliana
tggcttggtttatgtac

SEQ ID NO: 183087 - DNA, 17 bp, Arabidopsis thaliana
tggcttgtggcagccaa

SEQ ID NO: 183088 - DNA, 17 bp, Arabidopsis thaliana
tggcttttcaaccaacc

SEQ ID NO: 183089 - DNA, 17 bp, Arabidopsis thaliana
tgggaacggctctctcg

SEQ ID NO: 183090 - DNA, 17 bp, Arabidopsis thaliana
tgggaagaaagtgttga

SEQ ID NO: 183091 - DNA, 17 bp, Arabidopsis thaliana
tgggaagaaagtgttgc

SEQ ID NO: 183092 - DNA, 17 bp, Arabidopsis thaliana
tgggaagaacctctaaa

SEQ ID NO: 183093 - DNA, 17 bp, Arabidopsis thaliana
tgggaagcggatggggg

SEQ ID NO: 183094 - DNA, 17 bp, Arabidopsis thaliana
tgggaagtcagatggcc

SEQ ID NO: 183095 - DNA, 17 bp, Arabidopsis thaliana
tgggaatgcagctctaa

SEQ ID NO: 183096 - DNA, 17 bp, Arabidopsis thaliana
tgggaattgttttgtaa

SEQ ID NO: 183097 - DNA, 17 bp, Arabidopsis thaliana
tgggacggtattgggaa

SEQ ID NO: 183098 - DNA, 17 bp, Arabidopsis thaliana
tgggactgggtgtgtcg

SEQ ID NO: 183099 - DNA, 17 bp, Arabidopsis thaliana
tgggagatatccggaat

SEQ ID NO: 183100 - DNA, 17 bp, Arabidopsis thaliana
tgggagcgggcggcggc

SEQ ID NO: 183101 - DNA, 17 bp, Arabidopsis thaliana
tgggagggatctcgtgg

SEQ ID NO: 183102 - DNA, 17 bp, Arabidopsis thaliana
tgggagtagccatatag

SEQ ID NO: 183103 - DNA, 17 bp, Arabidopsis thaliana
tgggagttgtaaaattc

SEQ ID NO: 183104 - DNA, 17 bp, Arabidopsis thaliana
tgggatatgatgacaaa

SEQ ID NO: 183105 - DNA, 17 bp, Arabidopsis thaliana
tgggatcatactgacca

SEQ ID NO: 183106 - DNA, 17 bp, Arabidopsis thaliana
tgggatgcagattttca

SEQ ID NO: 183107 - DNA, 17 bp, Arabidopsis thaliana
tgggatgcagattttcc

SEQ ID NO: 183108 - DNA, 17 bp, Arabidopsis thaliana
tgggatgctgaaaatta

SEQ ID NO: 183109 - DNA, 17 bp, Arabidopsis thaliana
tgggatgctgaaaattg

SEQ ID NO: 183110 - DNA, 17 bp, Arabidopsis thaliana
tgggatggagaacaaaa

SEQ ID NO: 183111 - DNA, 17 bp, Arabidopsis thaliana
tgggatggagaacaaac

SEQ ID NO: 183112 - DNA, 17 bp, Arabidopsis thaliana
tgggatgggtcggccgg

SEQ ID NO: 183113 - DNA, 17 bp, Arabidopsis thaliana
tgggattaaataagatt

SEQ ID NO: 183114 - DNA, 17 bp, Arabidopsis thaliana
tgggatttgagagagcg

SEQ ID NO: 183115 - DNA, 17 bp, Arabidopsis thaliana
tgggattttctggattc

SEQ ID NO: 183116 - DNA, 17 bp, Arabidopsis thaliana
tgggcaactgcgtggta

SEQ ID NO: 183117 - DNA, 17 bp, Arabidopsis thaliana
tgggcaacttcagccgg

SEQ ID NO: 183118 - DNA, 17 bp, Arabidopsis thaliana
tgggcacaaacatcggc

SEQ ID NO: 183119 - DNA, 17 bp, Arabidopsis thaliana
tgggcacgatttccatc

SEQ ID NO: 183120 - DNA, 17 bp, Arabidopsis thaliana
tgggcagcaccaccata

SEQ ID NO: 183121 - DNA, 17 bp, Arabidopsis thaliana
tgggccaaaagaagctg

SEQ ID NO: 183122 - DNA, 17 bp, Arabidopsis thaliana
tgggccaaacgaagcta

SEQ ID NO: 183123 - DNA, 17 bp, Arabidopsis thaliana
tgggccaaacgaagctg

SEQ ID NO: 183124 - DNA, 17 bp, Arabidopsis thaliana
tgggccatggcgggcag

SEQ ID NO: 183125 - DNA, 17 bp, Arabidopsis thaliana
tgggccggtttcttagc

SEQ ID NO: 183126 - DNA, 17 bp, Arabidopsis thaliana
tgggccgtttcaaggag

SEQ ID NO: 183127 - DNA, 17 bp, Arabidopsis thaliana
tgggcctgctggtcggc

SEQ ID NO: 183128 - DNA, 17 bp, Arabidopsis thaliana
tgggcctggatttcgtc

SEQ ID NO: 183129 - DNA, 17 bp, Arabidopsis thaliana
tgggcggcggtcatttc

SEQ ID NO: 183130 - DNA, 17 bp, Arabidopsis thaliana
tgggcgtgtcggggaac

SEQ ID NO: 183131 - DNA, 17 bp, Arabidopsis thaliana
tgggcgtgtctgggaac

SEQ ID NO: 183132 - DNA, 17 bp, Arabidopsis thaliana
tgggcgtgtggggaacc

SEQ ID NO: 183133 - DNA, 17 bp, Arabidopsis thaliana
tgggctacgcaaacgac

SEQ ID NO: 183134 - DNA, 17 bp, Arabidopsis thaliana
tgggctgcgccactcaa

SEQ ID NO: 183135 - DNA, 17 bp, Arabidopsis thaliana
tgggctgcgtgggtatt

SEQ ID NO: 183136 - DNA, 17 bp, Arabidopsis thaliana
tgggcttctggggctac

SEQ ID NO: 183137 - DNA, 17 bp, Arabidopsis thaliana
tgggcttggagactgga

SEQ ID NO: 183138 - DNA, 17 bp, Arabidopsis thaliana
tgggctttcaagagtcg

SEQ ID NO: 183139 - DNA, 17 bp, Arabidopsis thaliana
tgggctttccgtcttca

SEQ ID NO: 183140 - DNA, 17 bp, Arabidopsis thaliana
tggggaagaatcgcgac

SEQ ID NO: 183141 - DNA, 17 bp, Arabidopsis thaliana
tggggaagcggtctctg

SEQ ID NO: 183142 - DNA, 17 bp, Arabidopsis thaliana
tggggacgaatgtgacg

SEQ ID NO: 183143 - DNA, 17 bp, Arabidopsis thaliana
tggggacgagatgtttt

SEQ ID NO: 183144 - DNA, 17 bp, Arabidopsis thaliana
tggggacgggatgtttt

SEQ ID NO: 183145 - DNA, 17 bp, Arabidopsis thaliana
tggggactgaccaggcc

SEQ ID NO: 183146 - DNA, 17 bp, Arabidopsis thaliana
tggggagtttgactggg

SEQ ID NO: 183147 - DNA, 17 bp, Arabidopsis thaliana
tggggagtttggctggg

SEQ ID NO: 183148 - DNA, 17 bp, Arabidopsis thaliana
tggggatagatcattgc

SEQ ID NO: 183149 - DNA, 17 bp, Arabidopsis thaliana
tggggatgtatacccgc

SEQ ID NO: 183150 - DNA, 17 bp, Arabidopsis thaliana
tggggattttgtttcgg

SEQ ID NO: 183151 - DNA, 17 bp, Arabidopsis thaliana
tggggcgtagccaagca

SEQ ID NO: 183152 - DNA, 17 bp, Arabidopsis thaliana
tggggcgtagccaagcg

SEQ ID NO: 183153 - DNA, 17 bp, Arabidopsis thaliana
tgggggacgaacataga

SEQ ID NO: 183154 - DNA, 17 bp, Arabidopsis thaliana
tgggggccggcgatgcg

SEQ ID NO: 183155 - DNA, 17 bp, Arabidopsis thaliana
tgggggcgacttatcca

SEQ ID NO: 183156 - DNA, 17 bp, Arabidopsis thaliana
tgggggctcgaagacga

SEQ ID NO: 183157 - DNA, 17 bp, Arabidopsis thaliana
tggggtcaatgcggata

SEQ ID NO: 183158 - DNA, 17 bp, Arabidopsis thaliana
tggggtcgatgcggaga

SEQ ID NO: 183159 - DNA, 17 bp, Arabidopsis thaliana
tggggtcgatgcggata

SEQ ID NO: 183160 - DNA, 17 bp, Arabidopsis thaliana
tggggtcgcagtgacca

SEQ ID NO: 183161 - DNA, 17 bp, Arabidopsis thaliana
tgggtagacatcgccga

SEQ ID NO: 183162 - DNA, 17 bp, Arabidopsis thaliana
tgggtagcgacgcttcc

SEQ ID NO: 183163 - DNA, 17 bp, Arabidopsis thaliana
tgggtagtctcgggtac

SEQ ID NO: 183164 - DNA, 17 bp, Arabidopsis thaliana
tgggtatcaatagggtt

SEQ ID NO: 183165 - DNA, 17 bp, Arabidopsis thaliana
tgggtcggcctgcatac

SEQ ID NO: 183166 - DNA, 17 bp, Arabidopsis thaliana
tgggtcgttgcgattac

SEQ ID NO: 183167 - DNA, 17 bp, Arabidopsis thaliana
tgggtgaccactgggga

SEQ ID NO: 183168 - DNA, 17 bp, Arabidopsis thaliana
tgggtgacctcccggga

SEQ ID NO: 183169 - DNA, 17 bp, Arabidopsis thaliana
tgggtgattggagagtt

SEQ ID NO: 183170 - DNA, 17 bp, Arabidopsis thaliana
tgggtgcacaagccttg

SEQ ID NO: 183171 - DNA, 17 bp, Arabidopsis thaliana
tgggtggcaaacaaaga

SEQ ID NO: 183172 - DNA, 17 bp, Arabidopsis thaliana
tgggtggtgatcatata

SEQ ID NO: 183173 - DNA, 17 bp, Arabidopsis thaliana
tgggtggtggtgcatgg

SEQ ID NO: 183174 - DNA, 17 bp, Arabidopsis thaliana
tgggtggttcgccgccc

SEQ ID NO: 183175 - DNA, 17 bp, Arabidopsis thaliana
tgggtggttcgcctttt

SEQ ID NO: 183176 - DNA, 17 bp, Arabidopsis thaliana
tgggtgtggcactctct

SEQ ID NO: 183177 - DNA, 17 bp, Arabidopsis thaliana
tgggttagattcgcaac

SEQ ID NO: 183178 - DNA, 17 bp, Arabidopsis thaliana
tgggttagccgatcctg

SEQ ID NO: 183179 - DNA, 17 bp, Arabidopsis thaliana
tgggttagccgatcctt

SEQ ID NO: 183180 - DNA, 17 bp, Arabidopsis thaliana
tgggttcagatcccaca

SEQ ID NO: 183181 - DNA, 17 bp, Arabidopsis thaliana
tgggttcatcccactgt

SEQ ID NO: 183182 - DNA, 17 bp, Arabidopsis thaliana
tgggttccggggggagt

SEQ ID NO: 183183 - DNA, 17 bp, Arabidopsis thaliana
tgggttcgagtcccatg

SEQ ID NO: 183184 - DNA, 17 bp, Arabidopsis thaliana
tgggttcgcgtcccacc

SEQ ID NO: 183185 - DNA, 17 bp, Arabidopsis thaliana
tgggttgccaacagaga

SEQ ID NO: 183186 - DNA, 17 bp, Arabidopsis thaliana
tgggttggctcgctcgg

SEQ ID NO: 183187 - DNA, 17 bp, Arabidopsis thaliana
tgggtttagatacactc

SEQ ID NO: 183188 - DNA, 17 bp, Arabidopsis thaliana
tgggtttagatgcactc

SEQ ID NO: 183189 - DNA, 17 bp, Arabidopsis thaliana
tgggttttgggatcata

SEQ ID NO: 183190 - DNA, 17 bp, Arabidopsis thaliana
tggtaaatgggatggag

SEQ ID NO: 183191 - DNA, 17 bp, Arabidopsis thaliana
tggtaacgggtgacgga

SEQ ID NO: 183192 - DNA, 17 bp, Arabidopsis thaliana
tggtaacgttgttgaag

SEQ ID NO: 183193 - DNA, 17 bp, Arabidopsis thaliana
tggtaactactactcgg

SEQ ID NO: 183194 - DNA, 17 bp, Arabidopsis thaliana
tggtaactggtattcat

SEQ ID NO: 183195 - DNA, 17 bp, Arabidopsis thaliana
tggtaagcgttggattg

SEQ ID NO: 183196 - DNA, 17 bp, Arabidopsis thaliana
tggtaatccaggttgaa

SEQ ID NO: 183197 - DNA, 17 bp, Arabidopsis thaliana
tggtacaagacgctttc

SEQ ID NO: 183198 - DNA, 17 bp, Arabidopsis thaliana
tggtaccagcggtatag

SEQ ID NO: 183199 - DNA, 17 bp, Arabidopsis thaliana
tggtacgacgattgccg

SEQ ID NO: 183200 - DNA, 17 bp, Arabidopsis thaliana
tggtagacacgctgctc

SEQ ID NO: 183201 - DNA, 17 bp, Arabidopsis thaliana
tggtagacgagacaccg

SEQ ID NO: 183202 - DNA, 17 bp, Arabidopsis thaliana
tggtagatgcaactctt

SEQ ID NO: 183203 - DNA, 17 bp, Arabidopsis thaliana
tggtagtccaacaatag

SEQ ID NO: 183204 - DNA, 17 bp, Arabidopsis thaliana
tggtataagcctgcctg

SEQ ID NO: 183205 - DNA, 17 bp, Arabidopsis thaliana
tggtattcatattgggg

SEQ ID NO: 183206 - DNA, 17 bp, Arabidopsis thaliana
tggtattggcgggatgg

SEQ ID NO: 183207 - DNA, 17 bp, Arabidopsis thaliana
tggtattgtaggttaca

SEQ ID NO: 183208 - DNA, 17 bp, Arabidopsis thaliana
tggtcactgcgaccccc

SEQ ID NO: 183209 - DNA, 17 bp, Arabidopsis thaliana
tggtcagaaaccgagca

SEQ ID NO: 183210 - DNA, 17 bp, Arabidopsis thaliana
tggtcaggggtaccggc

SEQ ID NO: 183211 - DNA, 17 bp, Arabidopsis thaliana
tggtccctgcggatgct

SEQ ID NO: 183212 - DNA, 17 bp, Arabidopsis thaliana
tggtccgagatccatct

SEQ ID NO: 183213 - DNA, 17 bp, Arabidopsis thaliana
tggtccgctggctcgta

SEQ ID NO: 183214 - DNA, 17 bp, Arabidopsis thaliana
tggtcctgcattttgcg

SEQ ID NO: 183215 - DNA, 17 bp, Arabidopsis thaliana
tggtcgattaagacagc

SEQ ID NO: 183216 - DNA, 17 bp, Arabidopsis thaliana
tggtcgcaaggctgaaa

SEQ ID NO: 183217 - DNA, 17 bp, Arabidopsis thaliana
tggtcgccatgtttttc

SEQ ID NO: 183218 - DNA, 17 bp, Arabidopsis thaliana
tggtcggcttgtccctt

SEQ ID NO: 183219 - DNA, 17 bp, Arabidopsis thaliana
tggtcggggtcttcatc

SEQ ID NO: 183220 - DNA, 17 bp, Arabidopsis thaliana
tggtcgtaggagcttcg

SEQ ID NO: 183221 - DNA, 17 bp, Arabidopsis thaliana
tggtcgtcggtgcggtc

SEQ ID NO: 183222 - DNA, 17 bp, Arabidopsis thaliana
tggtctacgaatcctaa

SEQ ID NO: 183223 - DNA, 17 bp, Arabidopsis thaliana
tggtctcccgtgtgtta

SEQ ID NO: 183224 - DNA, 17 bp, Arabidopsis thaliana
tggtctgcagcacgcgc

SEQ ID NO: 183225 - DNA, 17 bp, Arabidopsis thaliana
tggtctgtggtgaacta

SEQ ID NO: 183226 - DNA, 17 bp, Arabidopsis thaliana
tggtcttaagttgcttg

SEQ ID NO: 183227 - DNA, 17 bp, Arabidopsis thaliana
tggtcttcagaaagttt

SEQ ID NO: 183228 - DNA, 17 bp, Arabidopsis thaliana
tggtcttcgaaagaggg

SEQ ID NO: 183229 - DNA, 17 bp, Arabidopsis thaliana
tggtctttccactaagc

SEQ ID NO: 183230 - DNA, 17 bp, Arabidopsis thaliana
tggtgaactatgcctga

SEQ ID NO: 183231 - DNA, 17 bp, Arabidopsis thaliana
tggtgacctgatgacag

SEQ ID NO: 183232 - DNA, 17 bp, Arabidopsis thaliana
tggtgacctgatgactg

SEQ ID NO: 183233 - DNA, 17 bp, Arabidopsis thaliana
tggtgagcggcgcagat

SEQ ID NO: 183234 - DNA, 17 bp, Arabidopsis thaliana
tggtgatcagtaccgtg

SEQ ID NO: 183235 - DNA, 17 bp, Arabidopsis thaliana
tggtgatcggatagcca

SEQ ID NO: 183236 - DNA, 17 bp, Arabidopsis thaliana
tggtgcaaaccgttgaa

SEQ ID NO: 183237 - DNA, 17 bp, Arabidopsis thaliana
tggtgcatggccgttct

SEQ ID NO: 183238 - DNA, 17 bp, Arabidopsis thaliana
tggtggagaccatacct

SEQ ID NO: 183239 - DNA, 17 bp, Arabidopsis thaliana
tggtggagccgcgccaa

SEQ ID NO: 183240 - DNA, 17 bp, Arabidopsis thaliana
tggtggagcgatttgtc

SEQ ID NO: 183241 - DNA, 17 bp, Arabidopsis thaliana
tggtggagcgatttgtt

SEQ ID NO: 183242 - DNA, 17 bp, Arabidopsis thaliana
tggtggccaaaagatct

SEQ ID NO: 183243 - DNA, 17 bp, Arabidopsis thaliana
tggtggccttcgcggga

SEQ ID NO: 183244 - DNA, 17 bp, Arabidopsis thaliana
tggtggcggtggtggcg

SEQ ID NO: 183245 - DNA, 17 bp, Arabidopsis thaliana
tggtggctatcaggcga

SEQ ID NO: 183246 - DNA, 17 bp, Arabidopsis thaliana
tggtggtagatctcgaa

SEQ ID NO: 183247 - DNA, 17 bp, Arabidopsis thaliana
tggtggtagatctcgta

SEQ ID NO: 183248 - DNA, 17 bp, Arabidopsis thaliana
tggtggtcggacggtcg

SEQ ID NO: 183249 - DNA, 17 bp, Arabidopsis thaliana
tggtgtaacgactgccc

SEQ ID NO: 183250 - DNA, 17 bp, Arabidopsis thaliana
tggtgtaggtacaggtt

SEQ ID NO: 183251 - DNA, 17 bp, Arabidopsis thaliana
tggtgtgagaagattcc

SEQ ID NO: 183252 - DNA, 17 bp, Arabidopsis thaliana
tggtgtgcattggtcgg

SEQ ID NO: 183253 - DNA, 17 bp, Arabidopsis thaliana
tggttatccggcggacc

SEQ ID NO: 183254 - DNA, 17 bp, Arabidopsis thaliana
tggttcaggagaaacct

SEQ ID NO: 183255 - DNA, 17 bp, Arabidopsis thaliana
tggttcgccgcccgcca

SEQ ID NO: 183256 - DNA, 17 bp, Arabidopsis thaliana
tggttcgccgcccgcga

SEQ ID NO: 183257 - DNA, 17 bp, Arabidopsis thaliana
tggttcgtttccggcag

SEQ ID NO: 183258 - DNA, 17 bp, Arabidopsis thaliana
tggttgaaaagccagtg

SEQ ID NO: 183259 - DNA, 17 bp, Arabidopsis thaliana
tggttgaatctttgggt

SEQ ID NO: 183260 - DNA, 17 bp, Arabidopsis thaliana
tggttgacaacctttca

SEQ ID NO: 183261 - DNA, 17 bp, Arabidopsis thaliana
tggttgacaacctttga

SEQ ID NO: 183262 - DNA, 17 bp, Arabidopsis thaliana
tggttgacatcctctga

SEQ ID NO: 183263 - DNA, 17 bp, Arabidopsis thaliana
tggttgagccgtgtcat

SEQ ID NO: 183264 - DNA, 17 bp, Arabidopsis thaliana
tggttgatgaaccatga

SEQ ID NO: 183265 - DNA, 17 bp, Arabidopsis thaliana
tggttgcatgggccagt

SEQ ID NO: 183266 - DNA, 17 bp, Arabidopsis thaliana
tggttgtgacaaaaccg

SEQ ID NO: 183267 - DNA, 17 bp, Arabidopsis thaliana
tggtttcacagagcagc

SEQ ID NO: 183268 - DNA, 17 bp, Arabidopsis thaliana
tggtttggactgcgggg

SEQ ID NO: 183269 - DNA, 17 bp, Arabidopsis thaliana
tggttttccctgtagaa

SEQ ID NO: 183270 - DNA, 17 bp, Arabidopsis thaliana
tggtttttgcggttgtc

SEQ ID NO: 183271 - DNA, 17 bp, Arabidopsis thaliana
tggtttttgctgcaact

SEQ ID NO: 183272 - DNA, 17 bp, Arabidopsis thaliana
tggtttttggaattttc

SEQ ID NO: 183273 - DNA, 17 bp, Arabidopsis thaliana
tgtaaaattcatccgct

SEQ ID NO: 183274 - DNA, 17 bp, Arabidopsis thaliana
tgtaaagctcaggaggg

SEQ ID NO: 183275 - DNA, 17 bp, Arabidopsis thaliana
tgtaaccaaaacatata

SEQ ID NO: 183276 - DNA, 17 bp, Arabidopsis thaliana
tgtaaccaaaacatatt

SEQ ID NO: 183277 - DNA, 17 bp, Arabidopsis thaliana
tgtaactcttgttgatc

SEQ ID NO: 183278 - DNA, 17 bp, Arabidopsis thaliana
tgtaactgttccaagaa

SEQ ID NO: 183279 - DNA, 17 bp, Arabidopsis thaliana
tgtaactgttccaagat

SEQ ID NO: 183280 - DNA, 17 bp, Arabidopsis thaliana
tgtaactgttccaatat

SEQ ID NO: 183281 - DNA, 17 bp, Arabidopsis thaliana
tgtaagaccccatctct

SEQ ID NO: 183282 - DNA, 17 bp, Arabidopsis thaliana
tgtaaggccttttcttg

SEQ ID NO: 183283 - DNA, 17 bp, Arabidopsis thaliana
tgtaagtatgaacgaat

SEQ ID NO: 183284 - DNA, 17 bp, Arabidopsis thaliana
tgtaagtgactgtgttg

SEQ ID NO: 183285 - DNA, 17 bp, Arabidopsis thaliana
tgtaatattttaatacc

SEQ ID NO: 183286 - DNA, 17 bp, Arabidopsis thaliana
tgtaatgcgaaggtccc

SEQ ID NO: 183287 - DNA, 17 bp, Arabidopsis thaliana
tgtaatttcaaaattga

SEQ ID NO: 183288 - DNA, 17 bp, Arabidopsis thaliana
tgtacaaagggcaggga

SEQ ID NO: 183289 - DNA, 17 bp, Arabidopsis thaliana
tgtacacaccgcccgtc

SEQ ID NO: 183290 - DNA, 17 bp, Arabidopsis thaliana
tgtacagacccgggttc

SEQ ID NO: 183291 - DNA, 17 bp, Arabidopsis thaliana
tgtacagcctacctgga

SEQ ID NO: 183292 - DNA, 17 bp, Arabidopsis thaliana
tgtacgaccggaagctt

SEQ ID NO: 183293 - DNA, 17 bp, Arabidopsis thaliana
tgtactggcaaagatgc

SEQ ID NO: 183294 - DNA, 17 bp, Arabidopsis thaliana
tgtactggtttaggcct

SEQ ID NO: 183295 - DNA, 17 bp, Arabidopsis thaliana
tgtagacgttgacaatt

SEQ ID NO: 183296 - DNA, 17 bp, Arabidopsis thaliana
tgtagatcacaacacca

SEQ ID NO: 183297 - DNA, 17 bp, Arabidopsis thaliana
tgtagatcacaacattg

SEQ ID NO: 183298 - DNA, 17 bp, Arabidopsis thaliana
tgtagatggatcccaag

SEQ ID NO: 183299 - DNA, 17 bp, Arabidopsis thaliana
tgtagatggatccctgc

SEQ ID NO: 183300 - DNA, 17 bp, Arabidopsis thaliana
tgtagatggatcgccgg

SEQ ID NO: 183301 - DNA, 17 bp, Arabidopsis thaliana
tgtagatggatcgcttg

SEQ ID NO: 183302 - DNA, 17 bp, Arabidopsis thaliana
tgtagatggatctaccc

SEQ ID NO: 183303 - DNA, 17 bp, Arabidopsis thaliana
tgtagatggatctcctt

SEQ ID NO: 183304 - DNA, 17 bp, Arabidopsis thaliana
tgtagcggctacatgtc

SEQ ID NO: 183305 - DNA, 17 bp, Arabidopsis thaliana
tgtagctgccagcatga

SEQ ID NO: 183306 - DNA, 17 bp, Arabidopsis thaliana
tgtaggaggcgcgggtc

SEQ ID NO: 183307 - DNA, 17 bp, Arabidopsis thaliana
tgtaggatggggtagaa

SEQ ID NO: 183308 - DNA, 17 bp, Arabidopsis thaliana
tgtaggcaagggaagtc

SEQ ID NO: 183309 - DNA, 17 bp, Arabidopsis thaliana
tgtaggcgcagcaccat

SEQ ID NO: 183310 - DNA, 17 bp, Arabidopsis thaliana
tgtaggtacaggttggc

SEQ ID NO: 183311 - DNA, 17 bp, Arabidopsis thaliana
tgtagtaatggcgaaac

SEQ ID NO: 183312 - DNA, 17 bp, Arabidopsis thaliana
tgtagtcgcatcctgta

SEQ ID NO: 183313 - DNA, 17 bp, Arabidopsis thaliana
tgtagtgtttccaggag

SEQ ID NO: 183314 - DNA, 17 bp, Arabidopsis thaliana
tgtagttgcaaagagca

SEQ ID NO: 183315 - DNA, 17 bp, Arabidopsis thaliana
tgtatcacaggggcatt

SEQ ID NO: 183316 - DNA, 17 bp, Arabidopsis thaliana
tgtatctaaacccatac

SEQ ID NO: 183317 - DNA, 17 bp, Arabidopsis thaliana
tgtatgcttcaatacga

SEQ ID NO: 183318 - DNA, 17 bp, Arabidopsis thaliana
tgtatggtcgaagtagg

SEQ ID NO: 183319 - DNA, 17 bp, Arabidopsis thaliana
tgtatgtctgagaatct

SEQ ID NO: 183320 - DNA, 17 bp, Arabidopsis thaliana
tgtatttccgaatggtt

SEQ ID NO: 183321 - DNA, 17 bp, Arabidopsis thaliana
tgtatttgcaaagacca

SEQ ID NO: 183322 - DNA, 17 bp, Arabidopsis thaliana
tgtcaaaaaaaaaaaaa

SEQ ID NO: 183323 - DNA, 17 bp, Arabidopsis thaliana
tgtcaaaaaaaaaaaat

SEQ ID NO: 183324 - DNA, 17 bp, Arabidopsis thaliana
tgtcaaagtgaagaaat

SEQ ID NO: 183325 - DNA, 17 bp, Arabidopsis thaliana
tgtcagatctaattcac

SEQ ID NO: 183326 - DNA, 17 bp, Arabidopsis thaliana
tgtcagatttgcgtcga

SEQ ID NO: 183327 - DNA, 17 bp, Arabidopsis thaliana
tgtcagtataaatcttt

SEQ ID NO: 183328 - DNA, 17 bp, Arabidopsis thaliana
tgtcatccttgcgcagg

SEQ ID NO: 183329 - DNA, 17 bp, Arabidopsis thaliana
tgtcatgaagtctaccg

SEQ ID NO: 183330 - DNA, 17 bp, Arabidopsis thaliana
tgtcatttcggcaggca

SEQ ID NO: 183331 - DNA, 17 bp, Arabidopsis thaliana
tgtccaaaacagaacga

SEQ ID NO: 183332 - DNA, 17 bp, Arabidopsis thaliana
tgtccaaacgaaggtct

SEQ ID NO: 183333 - DNA, 17 bp, Arabidopsis thaliana
tgtccaagtccagcaaa

SEQ ID NO: 183334 - DNA, 17 bp, Arabidopsis thaliana
tgtccaatggcaagtcc

SEQ ID NO: 183335 - DNA, 17 bp, Arabidopsis thaliana
tgtccaatgtcttttct

SEQ ID NO: 183336 - DNA, 17 bp, Arabidopsis thaliana
tgtccagttggttgtgt

SEQ ID NO: 183337 - DNA, 17 bp, Arabidopsis thaliana
tgtccattgacgagaga

SEQ ID NO: 183338 - DNA, 17 bp, Arabidopsis thaliana
tgtcccaactcggaacc

SEQ ID NO: 183339 - DNA, 17 bp, Arabidopsis thaliana
tgtccccgattttatca

SEQ ID NO: 183340 - DNA, 17 bp, Arabidopsis thaliana
tgtcccggaaaagttcc

SEQ ID NO: 183341 - DNA, 17 bp, Arabidopsis thaliana
tgtcccggcctgcatgc

SEQ ID NO: 183342 - DNA, 17 bp, Arabidopsis thaliana
tgtccctatctactatc

SEQ ID NO: 183343 - DNA, 17 bp, Arabidopsis thaliana
tgtccctctaagaaaaa

SEQ ID NO: 183344 - DNA, 17 bp, Arabidopsis thaliana
tgtccctgtctactatc

SEQ ID NO: 183345 - DNA, 17 bp, Arabidopsis thaliana
tgtcccttcggtcggcg

SEQ ID NO: 183346 - DNA, 17 bp, Arabidopsis thaliana
tgtccgcagttgctaca

SEQ ID NO: 183347 - DNA, 17 bp, Arabidopsis thaliana
tgtccgcgacaaggcgc

SEQ ID NO: 183348 - DNA, 17 bp, Arabidopsis thaliana
tgtccgtcagcctcggg

SEQ ID NO: 183349 - DNA, 17 bp, Arabidopsis thaliana
tgtccgtcagtctcggg

SEQ ID NO: 183350 - DNA, 17 bp, Arabidopsis thaliana
tgtcctcaacgcttcta

SEQ ID NO: 183351 - DNA, 17 bp, Arabidopsis thaliana
tgtcctcggcattgcag

SEQ ID NO: 183352 - DNA, 17 bp, Arabidopsis thaliana
tgtcctgggatggtggc

SEQ ID NO: 183353 - DNA, 17 bp, Arabidopsis thaliana
tgtccttcaggtctgtg

SEQ ID NO: 183354 - DNA, 17 bp, Arabidopsis thaliana
tgtccttgaatattaaa

SEQ ID NO: 183355 - DNA, 17 bp, Arabidopsis thaliana
tgtcgagaagaggatta

SEQ ID NO: 183356 - DNA, 17 bp, Arabidopsis thaliana
tgtcgagaatgaagcta

SEQ ID NO: 183357 - DNA, 17 bp, Arabidopsis thaliana
tgtcgagaatgaagctg

SEQ ID NO: 183358 - DNA, 17 bp, Arabidopsis thaliana
tgtcgagtagaccttgt

SEQ ID NO: 183359 - DNA, 17 bp, Arabidopsis thaliana
tgtcgagtcaccaaggc

SEQ ID NO: 183360 - DNA, 17 bp, Arabidopsis thaliana
tgtcgagtttctacata

SEQ ID NO: 183361 - DNA, 17 bp, Arabidopsis thaliana
tgtcgagtttctacatt

SEQ ID NO: 183362 - DNA, 17 bp, Arabidopsis thaliana
tgtcgatacctgtccaa

SEQ ID NO: 183363 - DNA, 17 bp, Arabidopsis thaliana
tgtcgatatcaatgatg

SEQ ID NO: 183364 - DNA, 17 bp, Arabidopsis thaliana
tgtcgcagatctcaaac

SEQ ID NO: 183365 - DNA, 17 bp, Arabidopsis thaliana
tgtcgcatccgtagatg

SEQ ID NO: 183366 - DNA, 17 bp, Arabidopsis thaliana
tgtcgctaagattcgaa

SEQ ID NO: 183367 - DNA, 17 bp, Arabidopsis thaliana
tgtcggccaaggtgtga

SEQ ID NO: 183368 - DNA, 17 bp, Arabidopsis thaliana
tgtcgggacccgaaaga

SEQ ID NO: 183369 - DNA, 17 bp, Arabidopsis thaliana
tgtcgtctttccactaa

SEQ ID NO: 183370 - DNA, 17 bp, Arabidopsis thaliana
tgtcgtggtgacctagg

SEQ ID NO: 183371 - DNA, 17 bp, Arabidopsis thaliana
tgtcgttggctaagtcc

SEQ ID NO: 183372 - DNA, 17 bp, Arabidopsis thaliana
tgtctacgaatcctaag

SEQ ID NO: 183373 - DNA, 17 bp, Arabidopsis thaliana
tgtctacgagtcgggtt

SEQ ID NO: 183374 - DNA, 17 bp, Arabidopsis thaliana
tgtctagaaccgacaat

SEQ ID NO: 183375 - DNA, 17 bp, Arabidopsis thaliana
tgtctagtatccaagac

SEQ ID NO: 183376 - DNA, 17 bp, Arabidopsis thaliana
tgtctatatttgcagag

SEQ ID NO: 183377 - DNA, 17 bp, Arabidopsis thaliana
tgtctcaaaaaatctat

SEQ ID NO: 183378 - DNA, 17 bp, Arabidopsis thaliana
tgtctcacgacggtcta

SEQ ID NO: 183379 - DNA, 17 bp, Arabidopsis thaliana
tgtctcagaaaatctat

SEQ ID NO: 183380 - DNA, 17 bp, Arabidopsis thaliana
tgtctccagatctgaaa

SEQ ID NO: 183381 - DNA, 17 bp, Arabidopsis thaliana
tgtctcggtgggacctc

SEQ ID NO: 183382 - DNA, 17 bp, Arabidopsis thaliana
tgtctcttgtagttgct

SEQ ID NO: 183383 - DNA, 17 bp, Arabidopsis thaliana
tgtctgcaccatgttcg

SEQ ID NO: 183384 - DNA, 17 bp, Arabidopsis thaliana
tgtctgcagcacgcgcc

SEQ ID NO: 183385 - DNA, 17 bp, Arabidopsis thaliana
tgtctgtctcagtcttc

SEQ ID NO: 183386 - DNA, 17 bp, Arabidopsis thaliana
tgtctgttttctcgatc

SEQ ID NO: 183387 - DNA, 17 bp, Arabidopsis thaliana
tgtcttaaccagttact

SEQ ID NO: 183388 - DNA, 17 bp, Arabidopsis thaliana
tgtcttagtcgcatcct

SEQ ID NO: 183389 - DNA, 17 bp, Arabidopsis thaliana
tgtcttcactcactgtc

SEQ ID NO: 183390 - DNA, 17 bp, Arabidopsis thaliana
tgtgaaaccagcctcac

SEQ ID NO: 183391 - DNA, 17 bp, Arabidopsis thaliana
tgtgaaactgcgaatgg

SEQ ID NO: 183392 - DNA, 17 bp, Arabidopsis thaliana
tgtgaaatgacttgaga

SEQ ID NO: 183393 - DNA, 17 bp, Arabidopsis thaliana
tgtgaacatattcaagg

SEQ ID NO: 183394 - DNA, 17 bp, Arabidopsis thaliana
tgtgaagaaaaagccca

SEQ ID NO: 183395 - DNA, 17 bp, Arabidopsis thaliana
tgtgaagaaaaagtcaa

SEQ ID NO: 183396 - DNA, 17 bp, Arabidopsis thaliana
tgtgaagaaaaagtcca

SEQ ID NO: 183397 - DNA, 17 bp, Arabidopsis thaliana
tgtgaaggagttcattg

SEQ ID NO: 183398 - DNA, 17 bp, Arabidopsis thaliana
tgtgaatcttaatggtg

SEQ ID NO: 183399 - DNA, 17 bp, Arabidopsis thaliana
tgtgaattgcagaaaga

SEQ ID NO: 183400 - DNA, 17 bp, Arabidopsis thaliana
tgtgaattgcagaatcc

SEQ ID NO: 183401 - DNA, 17 bp, Arabidopsis thaliana
tgtgacaacttttttta

SEQ ID NO: 183402 - DNA, 17 bp, Arabidopsis thaliana
tgtgaccagacttgcgc

SEQ ID NO: 183403 - DNA, 17 bp, Arabidopsis thaliana
tgtgactggttcgacgc

SEQ ID NO: 183404 - DNA, 17 bp, Arabidopsis thaliana
tgtgagatttgggatgt

SEQ ID NO: 183405 - DNA, 17 bp, Arabidopsis thaliana
tgtgagtaagacgtgtg

SEQ ID NO: 183406 - DNA, 17 bp, Arabidopsis thaliana
tgtgatccgtccactgc

SEQ ID NO: 183407 - DNA, 17 bp, Arabidopsis thaliana
tgtgatgcccgtagatg

SEQ ID NO: 183408 - DNA, 17 bp, Arabidopsis thaliana
tgtgatgcccttagatg

SEQ ID NO: 183409 - DNA, 17 bp, Arabidopsis thaliana
tgtgattctctgtgtaa

SEQ ID NO: 183410 - DNA, 17 bp, Arabidopsis thaliana
tgtgattgcttaattta

SEQ ID NO: 183411 - DNA, 17 bp, Arabidopsis thaliana
tgtgatttctgcccagt

SEQ ID NO: 183412 - DNA, 17 bp, Arabidopsis thaliana
tgtgcaaatgcttctac

SEQ ID NO: 183413 - DNA, 17 bp, Arabidopsis thaliana
tgtgcaaatgctttcta

SEQ ID NO: 183414 - DNA, 17 bp, Arabidopsis thaliana
tgtgcaatggaagtcac

SEQ ID NO: 183415 - DNA, 17 bp, Arabidopsis thaliana
tgtgcataggtcggctt

SEQ ID NO: 183416 - DNA, 17 bp, Arabidopsis thaliana
tgtgcattggtcggctt

SEQ ID NO: 183417 - DNA, 17 bp, Arabidopsis thaliana
tgtgccatcatctccaa

SEQ ID NO: 183418 - DNA, 17 bp, Arabidopsis thaliana
tgtgcccacgacttccc

SEQ ID NO: 183419 - DNA, 17 bp, Arabidopsis thaliana
tgtgcccatcacacgag

SEQ ID NO: 183420 - DNA, 17 bp, Arabidopsis thaliana
tgtgcgatggagcagga

SEQ ID NO: 183421 - DNA, 17 bp, Arabidopsis thaliana
tgtgcggccaatacgag

SEQ ID NO: 183422 - DNA, 17 bp, Arabidopsis thaliana
tgtgcgggtttggttct

SEQ ID NO: 183423 - DNA, 17 bp, Arabidopsis thaliana
tgtgctaaaacactctc

SEQ ID NO: 183424 - DNA, 17 bp, Arabidopsis thaliana
tgtgctcaccacatggc

SEQ ID NO: 183425 - DNA, 17 bp, Arabidopsis thaliana
tgtgctgatggaccctg

SEQ ID NO: 183426 - DNA, 17 bp, Arabidopsis thaliana
tgtgctggcgacgcatc

SEQ ID NO: 183427 - DNA, 17 bp, Arabidopsis thaliana
tgtgcttagcctgtacg

SEQ ID NO: 183428 - DNA, 17 bp, Arabidopsis thaliana
tgtggaagttgctgttg

SEQ ID NO: 183429 - DNA, 17 bp, Arabidopsis thaliana
tgtggactatgaatgga

SEQ ID NO: 183430 - DNA, 17 bp, Arabidopsis thaliana
tgtggactatgaatggg

SEQ ID NO: 183431 - DNA, 17 bp, Arabidopsis thaliana
tgtggactgcttggtgg

SEQ ID NO: 183432 - DNA, 17 bp, Arabidopsis thaliana
tgtggagaaaaagccca

SEQ ID NO: 183433 - DNA, 17 bp, Arabidopsis thaliana
tgtggatgatgcactca

SEQ ID NO: 183434 - DNA, 17 bp, Arabidopsis thaliana
tgtggattcgattataa

SEQ ID NO: 183435 - DNA, 17 bp, Arabidopsis thaliana
tgtggattgcttggtgg

SEQ ID NO: 183436 - DNA, 17 bp, Arabidopsis thaliana
tgtggcagccaagcgtt

SEQ ID NO: 183437 - DNA, 17 bp, Arabidopsis thaliana
tgtggcattgttccgga

SEQ ID NO: 183438 - DNA, 17 bp, Arabidopsis thaliana
tgtggcattgttccggg

SEQ ID NO: 183439 - DNA, 17 bp, Arabidopsis thaliana
tgtggcgaaaaagtaag

SEQ ID NO: 183440 - DNA, 17 bp, Arabidopsis thaliana
tgtggcgaaaaagtcaa

SEQ ID NO: 183441 - DNA, 17 bp, Arabidopsis thaliana
tgtggcgaaaaagtcca

SEQ ID NO: 183442 - DNA, 17 bp, Arabidopsis thaliana
tgtgggaaggagctatg

SEQ ID NO: 183443 - DNA, 17 bp, Arabidopsis thaliana
tgtgggagttggctgtg

SEQ ID NO: 183444 - DNA, 17 bp, Arabidopsis thaliana
tgtgggcttctggggct

SEQ ID NO: 183445 - DNA, 17 bp, Arabidopsis thaliana
tgtgggggcagcttctc

SEQ ID NO: 183446 - DNA, 17 bp, Arabidopsis thaliana
tgtgggtcaggcgaagg

SEQ ID NO: 183447 - DNA, 17 bp, Arabidopsis thaliana
tgtgggtggcaaacaaa

SEQ ID NO: 183448 - DNA, 17 bp, Arabidopsis thaliana
tgtgggtgtaaatgaat

SEQ ID NO: 183449 - DNA, 17 bp, Arabidopsis thaliana
tgtggtagatgcaactc

SEQ ID NO: 183450 - DNA, 17 bp, Arabidopsis thaliana
tgtggtggtttatcgat

SEQ ID NO: 183451 - DNA, 17 bp, Arabidopsis thaliana
tgtggtgtgtttgtgac

SEQ ID NO: 183452 - DNA, 17 bp, Arabidopsis thaliana
tgtggttggaacaatga

SEQ ID NO: 183453 - DNA, 17 bp, Arabidopsis thaliana
tgtgtacaaagggcagg

SEQ ID NO: 183454 - DNA, 17 bp, Arabidopsis thaliana
tgtgtactcaggtcacc

SEQ ID NO: 183455 - DNA, 17 bp, Arabidopsis thaliana
tgtgtagaaaaagccca

SEQ ID NO: 183456 - DNA, 17 bp, Arabidopsis thaliana
tgtgtaggataggtggg

SEQ ID NO: 183457 - DNA, 17 bp, Arabidopsis thaliana
tgtgtcaagctcctcat

SEQ ID NO: 183458 - DNA, 17 bp, Arabidopsis thaliana
tgtgtcacacaaaacca

SEQ ID NO: 183459 - DNA, 17 bp, Arabidopsis thaliana
tgtgtccaaacagcgga

SEQ ID NO: 183460 - DNA, 17 bp, Arabidopsis thaliana
tgtgtctatgtatgcat

SEQ ID NO: 183461 - DNA, 17 bp, Arabidopsis thaliana
tgtgtctgctgtgtggt

SEQ ID NO: 183462 - DNA, 17 bp, Arabidopsis thaliana
tgtgtgtgatgatacaa

SEQ ID NO: 183463 - DNA, 17 bp, Arabidopsis thaliana
tgtgtgttcagactgag

SEQ ID NO: 183464 - DNA, 17 bp, Arabidopsis thaliana
tgtgttaatgtaccatg

SEQ ID NO: 183465 - DNA, 17 bp, Arabidopsis thaliana
tgtgttcaagtaaatga

SEQ ID NO: 183466 - DNA, 17 bp, Arabidopsis thaliana
tgtgttctcaggtcaca

SEQ ID NO: 183467 - DNA, 17 bp, Arabidopsis thaliana
tgtgttctcaggtcacc

SEQ ID NO: 183468 - DNA, 17 bp, Arabidopsis thaliana
tgtgttctcaggtcact

SEQ ID NO: 183469 - DNA, 17 bp, Arabidopsis thaliana
tgtgttctcaggtcatc

SEQ ID NO: 183470 - DNA, 17 bp, Arabidopsis thaliana
tgtgttctcaggtcatt

SEQ ID NO: 183471 - DNA, 17 bp, Arabidopsis thaliana
tgtgttgaaaaagccca

SEQ ID NO: 183472 - DNA, 17 bp, Arabidopsis thaliana
tgtgtttggtgcttaag

SEQ ID NO: 183473 - DNA, 17 bp, Arabidopsis thaliana
tgtgttttcaaactttt

SEQ ID NO: 183474 - DNA, 17 bp, Arabidopsis thaliana
tgtgttttctagtgtag

SEQ ID NO: 183475 - DNA, 17 bp, Arabidopsis thaliana
tgtgttttctagtgttt

SEQ ID NO: 183476 - DNA, 17 bp, Arabidopsis thaliana
tgttacacgtggtggct

SEQ ID NO: 183477 - DNA, 17 bp, Arabidopsis thaliana
tgttactggagaacgta

SEQ ID NO: 183478 - DNA, 17 bp, Arabidopsis thaliana
tgttactggagaacgtt

SEQ ID NO: 183479 - DNA, 17 bp, Arabidopsis thaliana
tgttagaaagtctcgta

SEQ ID NO: 183480 - DNA, 17 bp, Arabidopsis thaliana
tgttagcccgacaccaa

SEQ ID NO: 183481 - DNA, 17 bp, Arabidopsis thaliana
tgttataagctttgaat

SEQ ID NO: 183482 - DNA, 17 bp, Arabidopsis thaliana
tgttatccctctcatac

SEQ ID NO: 183483 - DNA, 17 bp, Arabidopsis thaliana
tgttatcttcgatgtgc

SEQ ID NO: 183484 - DNA, 17 bp, Arabidopsis thaliana
tgttatgcgtcctatct

SEQ ID NO: 183485 - DNA, 17 bp, Arabidopsis thaliana
tgttattacctacagct

SEQ ID NO: 183486 - DNA, 17 bp, Arabidopsis thaliana
tgttatttggatgctgc

SEQ ID NO: 183487 - DNA, 17 bp, Arabidopsis thaliana
tgttattttctacttaa

SEQ ID NO: 183488 - DNA, 17 bp, Arabidopsis thaliana
tgttcacttctttttcg

SEQ ID NO: 183489 - DNA, 17 bp, Arabidopsis thaliana
tgttccacgcagaccgc

SEQ ID NO: 183490 - DNA, 17 bp, Arabidopsis thaliana
tgttccacgccagccga

SEQ ID NO: 183491 - DNA, 17 bp, Arabidopsis thaliana
tgttccatcttctttaa

SEQ ID NO: 183492 - DNA, 17 bp, Arabidopsis thaliana
tgttccattcactgaag

SEQ ID NO: 183493 - DNA, 17 bp, Arabidopsis thaliana
tgttccctgggattggc

SEQ ID NO: 183494 - DNA, 17 bp, Arabidopsis thaliana
tgttccgatcgcggcga

SEQ ID NO: 183495 - DNA, 17 bp, Arabidopsis thaliana
tgttcctgataattaca

SEQ ID NO: 183496 - DNA, 17 bp, Arabidopsis thaliana
tgttcctgtcaactcgt

SEQ ID NO: 183497 - DNA, 17 bp, Arabidopsis thaliana
tgttccttcttctgtaa

SEQ ID NO: 183498 - DNA, 17 bp, Arabidopsis thaliana
tgttcgattcacggctg

SEQ ID NO: 183499 - DNA, 17 bp, Arabidopsis thaliana
tgttcgattgagccgtg

SEQ ID NO: 183500 - DNA, 17 bp, Arabidopsis thaliana
tgttcggatcgcggcga

SEQ ID NO: 183501 - DNA, 17 bp, Arabidopsis thaliana
tgttcggtccacgctca

SEQ ID NO: 183502 - DNA, 17 bp, Arabidopsis thaliana
tgttcgtaatcgcggga

SEQ ID NO: 183503 - DNA, 17 bp, Arabidopsis thaliana
tgttcgttccacgctca

SEQ ID NO: 183504 - DNA, 17 bp, Arabidopsis thaliana
tgttctagatcggcaca

SEQ ID NO: 183505 - DNA, 17 bp, Arabidopsis thaliana
tgttctataggctcgta

SEQ ID NO: 183506 - DNA, 17 bp, Arabidopsis thaliana
tgttctatcttctatgg

SEQ ID NO: 183507 - DNA, 17 bp, Arabidopsis thaliana
tgttctccggaatgact

SEQ ID NO: 183508 - DNA, 17 bp, Arabidopsis thaliana
tgttctcgtggttattt

SEQ ID NO: 183509 - DNA, 17 bp, Arabidopsis thaliana
tgttctgaagttttgcg

SEQ ID NO: 183510 - DNA, 17 bp, Arabidopsis thaliana
tgttctggctcagcaat

SEQ ID NO: 183511 - DNA, 17 bp, Arabidopsis thaliana
tgttctgggccgcacgc

SEQ ID NO: 183512 - DNA, 17 bp, Arabidopsis thaliana
tgttctgtggctgatga

SEQ ID NO: 183513 - DNA, 17 bp, Arabidopsis thaliana
tgttcttacaggagagg

SEQ ID NO: 183514 - DNA, 17 bp, Arabidopsis thaliana
tgttcttcggaatgaca

SEQ ID NO: 183515 - DNA, 17 bp, Arabidopsis thaliana
tgttcttcggaatgact

SEQ ID NO: 183516 - DNA, 17 bp, Arabidopsis thaliana
tgttcttcgtaacgggc

SEQ ID NO: 183517 - DNA, 17 bp, Arabidopsis thaliana
tgttgactcggatgatg

SEQ ID NO: 183518 - DNA, 17 bp, Arabidopsis thaliana
tgttgactgttgagtta

SEQ ID NO: 183519 - DNA, 17 bp, Arabidopsis thaliana
tgttgactgttgagttt

SEQ ID NO: 183520 - DNA, 17 bp, Arabidopsis thaliana
tgttgagcaggtttcta

SEQ ID NO: 183521 - DNA, 17 bp, Arabidopsis thaliana
tgttgagcaggtttctt

SEQ ID NO: 183522 - DNA, 17 bp, Arabidopsis thaliana
tgttgaggattgtctaa

SEQ ID NO: 183523 - DNA, 17 bp, Arabidopsis thaliana
tgttgatcggatggtaa

SEQ ID NO: 183524 - DNA, 17 bp, Arabidopsis thaliana
tgttgatcggatggtag

SEQ ID NO: 183525 - DNA, 17 bp, Arabidopsis thaliana
tgttgatgctgaccgga

SEQ ID NO: 183526 - DNA, 17 bp, Arabidopsis thaliana
tgttgcttggctaagtt

SEQ ID NO: 183527 - DNA, 17 bp, Arabidopsis thaliana
tgttggactaccatcat

SEQ ID NO: 183528 - DNA, 17 bp, Arabidopsis thaliana
tgttggacttagaagat

SEQ ID NO: 183529 - DNA, 17 bp, Arabidopsis thaliana
tgttggatttcatcaga

SEQ ID NO: 183530 - DNA, 17 bp, Arabidopsis thaliana
tgttggcccaaatcttt

SEQ ID NO: 183531 - DNA, 17 bp, Arabidopsis thaliana
tgttggtcacaacaata

SEQ ID NO: 183532 - DNA, 17 bp, Arabidopsis thaliana
tgttggtcggagggatg

SEQ ID NO: 183533 - DNA, 17 bp, Arabidopsis thaliana
tgttggttcagttggtt

SEQ ID NO: 183534 - DNA, 17 bp, Arabidopsis thaliana
tgttgtactcggtctag

SEQ ID NO: 183535 - DNA, 17 bp, Arabidopsis thaliana
tgttgtcgccttttgcc

SEQ ID NO: 183536 - DNA, 17 bp, Arabidopsis thaliana
tgttgtgaagtctacat

SEQ ID NO: 183537 - DNA, 17 bp, Arabidopsis thaliana
tgttgtgaccaacattt

SEQ ID NO: 183538 - DNA, 17 bp, Arabidopsis thaliana
tgttgtgaccgacattt

SEQ ID NO: 183539 - DNA, 17 bp, Arabidopsis thaliana
tgttgtggcgaaaaagt

SEQ ID NO: 183540 - DNA, 17 bp, Arabidopsis thaliana
tgttgttctatttgcgc

SEQ ID NO: 183541 - DNA, 17 bp, Arabidopsis thaliana
tgtttaacagcctgccc

SEQ ID NO: 183542 - DNA, 17 bp, Arabidopsis thaliana
tgtttaatttgactaaa

SEQ ID NO: 183543 - DNA, 17 bp, Arabidopsis thaliana
tgtttaccagtttgttc

SEQ ID NO: 183544 - DNA, 17 bp, Arabidopsis thaliana
tgtttaccgtaatgccg

SEQ ID NO: 183545 - DNA, 17 bp, Arabidopsis thaliana
tgtttcaaacacttggt

SEQ ID NO: 183546 - DNA, 17 bp, Arabidopsis thaliana
tgtttccttgatttctc

SEQ ID NO: 183547 - DNA, 17 bp, Arabidopsis thaliana
tgtttcgggtcataacg

SEQ ID NO: 183548 - DNA, 17 bp, Arabidopsis thaliana
tgtttcgggtcatacat

SEQ ID NO: 183549 - DNA, 17 bp, Arabidopsis thaliana
tgtttctaaagatggac

SEQ ID NO: 183550 - DNA, 17 bp, Arabidopsis thaliana
tgtttctaccatccgat

SEQ ID NO: 183551 - DNA, 17 bp, Arabidopsis thaliana
tgtttctcggaacgccc

SEQ ID NO: 183552 - DNA, 17 bp, Arabidopsis thaliana
tgtttctgcttcgatcg

SEQ ID NO: 183553 - DNA, 17 bp, Arabidopsis thaliana
tgtttctttcatcgaag

SEQ ID NO: 183554 - DNA, 17 bp, Arabidopsis thaliana
tgtttgaaaattccaag

SEQ ID NO: 183555 - DNA, 17 bp, Arabidopsis thaliana
tgtttgagaaagatttt

SEQ ID NO: 183556 - DNA, 17 bp, Arabidopsis thaliana
tgtttgagatctgcgac

SEQ ID NO: 183557 - DNA, 17 bp, Arabidopsis thaliana
tgtttgggagtagccat

SEQ ID NO: 183558 - DNA, 17 bp, Arabidopsis thaliana
tgtttgtgcttgaatct

SEQ ID NO: 183559 - DNA, 17 bp, Arabidopsis thaliana
tgtttgtggactgcttg

SEQ ID NO: 183560 - DNA, 17 bp, Arabidopsis thaliana
tgtttgtggattcataa

SEQ ID NO: 183561 - DNA, 17 bp, Arabidopsis thaliana
tgtttgtggattcgatt

SEQ ID NO: 183562 - DNA, 17 bp, Arabidopsis thaliana
tgtttgtggattcgttt

SEQ ID NO: 183563 - DNA, 17 bp, Arabidopsis thaliana
tgtttgtgtactggttt

SEQ ID NO: 183564 - DNA, 17 bp, Arabidopsis thaliana
tgtttgttattttgaaa

SEQ ID NO: 183565 - DNA, 17 bp, Arabidopsis thaliana
tgtttgttgctgagtcg

SEQ ID NO: 183566 - DNA, 17 bp, Arabidopsis thaliana
tgtttgttgtactcggt

SEQ ID NO: 183567 - DNA, 17 bp, Arabidopsis thaliana
tgttttaacttcttcca

SEQ ID NO: 183568 - DNA, 17 bp, Arabidopsis thaliana
tgttttatctagatgat

SEQ ID NO: 183569 - DNA, 17 bp, Arabidopsis thaliana
tgttttatgtgcggacg

SEQ ID NO: 183570 - DNA, 17 bp, Arabidopsis thaliana
tgttttcctcattttgg

SEQ ID NO: 183571 - DNA, 17 bp, Arabidopsis thaliana
tgttttcggggtttatc

SEQ ID NO: 183572 - DNA, 17 bp, Arabidopsis thaliana
tgttttgaatgtgttca

SEQ ID NO: 183573 - DNA, 17 bp, Arabidopsis thaliana
tgttttggacaggtatc

SEQ ID NO: 183574 - DNA, 17 bp, Arabidopsis thaliana
tgttttgggtacagagg

SEQ ID NO: 183575 - DNA, 17 bp, Arabidopsis thaliana
tgttttggttacagagg

SEQ ID NO: 183576 - DNA, 17 bp, Arabidopsis thaliana
tgttttgtgcttgaatc

SEQ ID NO: 183577 - DNA, 17 bp, Arabidopsis thaliana
tgttttgtgcttggatc

SEQ ID NO: 183578 - DNA, 17 bp, Arabidopsis thaliana
tgtttttcgaccgtcca

SEQ ID NO: 183579 - DNA, 17 bp, Arabidopsis thaliana
tgtttttgaaatgtttt

SEQ ID NO: 183580 - DNA, 17 bp, Arabidopsis thaliana
tgtttttggtcccaagg

SEQ ID NO: 183581 - DNA, 17 bp, Arabidopsis thaliana
ttaaaaatccgaataaa

SEQ ID NO: 183582 - DNA, 17 bp, Arabidopsis thaliana
ttaaaactgatacttcc

SEQ ID NO: 183583 - DNA, 17 bp, Arabidopsis thaliana
ttaaaagccaaaactga

SEQ ID NO: 183584 - DNA, 17 bp, Arabidopsis thaliana
ttaaaagctatacaaca

SEQ ID NO: 183585 - DNA, 17 bp, Arabidopsis thaliana
ttaaaattccggaaccg

SEQ ID NO: 183586 - DNA, 17 bp, Arabidopsis thaliana
ttaaaatttgtcaagag

SEQ ID NO: 183587 - DNA, 17 bp, Arabidopsis thaliana
ttaaagaggacttgaaa

SEQ ID NO: 183588 - DNA, 17 bp, Arabidopsis thaliana
ttaaagccaaatcaata

SEQ ID NO: 183589 - DNA, 17 bp, Arabidopsis thaliana
ttaaagccaaatcaggt

SEQ ID NO: 183590 - DNA, 17 bp, Arabidopsis thaliana
ttaaaggttgggatatt

SEQ ID NO: 183591 - DNA, 17 bp, Arabidopsis thaliana
ttaaagtttcacacaaa

SEQ ID NO: 183592 - DNA, 17 bp, Arabidopsis thaliana
ttaaataagatttttcg

SEQ ID NO: 183593 - DNA, 17 bp, Arabidopsis thaliana
ttaaatgaccgctacac

SEQ ID NO: 183594 - DNA, 17 bp, Arabidopsis thaliana
ttaaatgaccgctacat

SEQ ID NO: 183595 - DNA, 17 bp, Arabidopsis thaliana
ttaacacctaacagtcg

SEQ ID NO: 183596 - DNA, 17 bp, Arabidopsis thaliana
ttaacagatgtgccgcc

SEQ ID NO: 183597 - DNA, 17 bp, Arabidopsis thaliana
ttaaccaccagtaccca

SEQ ID NO: 183598 - DNA, 17 bp, Arabidopsis thaliana
ttaaccactcggccaaa

SEQ ID NO: 183599 - DNA, 17 bp, Arabidopsis thaliana
ttaaccctggttgatgg

SEQ ID NO: 183600 - DNA, 17 bp, Arabidopsis thaliana
ttaacgaacgagacctc

SEQ ID NO: 183601 - DNA, 17 bp, Arabidopsis thaliana
ttaacgagattcccact

SEQ ID NO: 183602 - DNA, 17 bp, Arabidopsis thaliana
ttaactaatacgcattg

SEQ ID NO: 183603 - DNA, 17 bp, Arabidopsis thaliana
ttaactctctttgtttt

SEQ ID NO: 183604 - DNA, 17 bp, Arabidopsis thaliana
ttaactgagaaggatag

SEQ ID NO: 183605 - DNA, 17 bp, Arabidopsis thaliana
ttaactggtattcatat

SEQ ID NO: 183606 - DNA, 17 bp, Arabidopsis thaliana
ttaacttctcggcttcc

SEQ ID NO: 183607 - DNA, 17 bp, Arabidopsis thaliana
ttaagacttcatgtggt

SEQ ID NO: 183608 - DNA, 17 bp, Arabidopsis thaliana
ttaagaggacttggaac

SEQ ID NO: 183609 - DNA, 17 bp, Arabidopsis thaliana
ttaagattaccacatca

SEQ ID NO: 183610 - DNA, 17 bp, Arabidopsis thaliana
ttaagcactgatgatgc

SEQ ID NO: 183611 - DNA, 17 bp, Arabidopsis thaliana
ttaagccatgcatgtgt

SEQ ID NO: 183612 - DNA, 17 bp, Arabidopsis thaliana
ttaagccgtgccaatat

SEQ ID NO: 183613 - DNA, 17 bp, Arabidopsis thaliana
ttaagcgacgactagca

SEQ ID NO: 183614 - DNA, 17 bp, Arabidopsis thaliana
ttaagctgccagcatga

SEQ ID NO: 183615 - DNA, 17 bp, Arabidopsis thaliana
ttaagtactgatgatgc

SEQ ID NO: 183616 - DNA, 17 bp, Arabidopsis thaliana
ttaagtcgcatcctgta

SEQ ID NO: 183617 - DNA, 17 bp, Arabidopsis thaliana
ttaagtgtcgtctttcc

SEQ ID NO: 183618 - DNA, 17 bp, Arabidopsis thaliana
ttaatcactcggccaaa

SEQ ID NO: 183619 - DNA, 17 bp, Arabidopsis thaliana
ttaatcccacttttgtg

SEQ ID NO: 183620 - DNA, 17 bp, Arabidopsis thaliana
ttaatgacttcggcttg

SEQ ID NO: 183621 - DNA, 17 bp, Arabidopsis thaliana
ttaatggtgctgcgatc

SEQ ID NO: 183622 - DNA, 17 bp, Arabidopsis thaliana
ttaattttggggatttt

SEQ ID NO: 183623 - DNA, 17 bp, Arabidopsis thaliana
ttacaacgactgtatca

SEQ ID NO: 183624 - DNA, 17 bp, Arabidopsis thaliana
ttacaacgactgtatct

SEQ ID NO: 183625 - DNA, 17 bp, Arabidopsis thaliana
ttacaaggtcaagaaaa

SEQ ID NO: 183626 - DNA, 17 bp, Arabidopsis thaliana
ttacaaggtcaagaaag

SEQ ID NO: 183627 - DNA, 17 bp, Arabidopsis thaliana
ttacaaggtcaagaaga

SEQ ID NO: 183628 - DNA, 17 bp, Arabidopsis thaliana
ttacaaggtcaagagaa

SEQ ID NO: 183629 - DNA, 17 bp, Arabidopsis thaliana
ttacaaggtgttgtgaa

SEQ ID NO: 183630 - DNA, 17 bp, Arabidopsis thaliana
ttacaatctcaagatgg

SEQ ID NO: 183631 - DNA, 17 bp, Arabidopsis thaliana
ttacaatctcaagatgt

SEQ ID NO: 183632 - DNA, 17 bp, Arabidopsis thaliana
ttacagatggtgatcga

SEQ ID NO: 183633 - DNA, 17 bp, Arabidopsis thaliana
ttaccaacctttcatcg

SEQ ID NO: 183634 - DNA, 17 bp, Arabidopsis thaliana
ttaccaagattagggac

SEQ ID NO: 183635 - DNA, 17 bp, Arabidopsis thaliana
ttaccaccgagcggcgg

SEQ ID NO: 183636 - DNA, 17 bp, Arabidopsis thaliana
ttaccacgcagttgccc

SEQ ID NO: 183637 - DNA, 17 bp, Arabidopsis thaliana
ttaccactgcggatgga

SEQ ID NO: 183638 - DNA, 17 bp, Arabidopsis thaliana
ttaccactgcggattcc

SEQ ID NO: 183639 - DNA, 17 bp, Arabidopsis thaliana
ttaccagtatcttatgc

SEQ ID NO: 183640 - DNA, 17 bp, Arabidopsis thaliana
ttaccagtatgttatgc

SEQ ID NO: 183641 - DNA, 17 bp, Arabidopsis thaliana
ttacccaatcctgacac

SEQ ID NO: 183642 - DNA, 17 bp, Arabidopsis thaliana
ttacccgcaggattgtg

SEQ ID NO: 183643 - DNA, 17 bp, Arabidopsis thaliana
ttacccgctgagtttaa

SEQ ID NO: 183644 - DNA, 17 bp, Arabidopsis thaliana
ttacccgttatccaaaa

SEQ ID NO: 183645 - DNA, 17 bp, Arabidopsis thaliana
ttaccctactgatgccc

SEQ ID NO: 183646 - DNA, 17 bp, Arabidopsis thaliana
ttaccgcagggataact

SEQ ID NO: 183647 - DNA, 17 bp, Arabidopsis thaliana
ttaccgtaatgccgtcg

SEQ ID NO: 183648 - DNA, 17 bp, Arabidopsis thaliana
ttacctaattcgtatcc

SEQ ID NO: 183649 - DNA, 17 bp, Arabidopsis thaliana
ttacctgatggatttgc

SEQ ID NO: 183650 - DNA, 17 bp, Arabidopsis thaliana
ttacgatgaggatgtac

SEQ ID NO: 183651 - DNA, 17 bp, Arabidopsis thaliana
ttacgctatgttggact

SEQ ID NO: 183652 - DNA, 17 bp, Arabidopsis thaliana
ttacgtgcaaaggcaaa

SEQ ID NO: 183653 - DNA, 17 bp, Arabidopsis thaliana
ttacgttgggcaacagc

SEQ ID NO: 183654 - DNA, 17 bp, Arabidopsis thaliana
ttacgttgggcaactgc

SEQ ID NO: 183655 - DNA, 17 bp, Arabidopsis thaliana
ttactaaaatctccctt

SEQ ID NO: 183656 - DNA, 17 bp, Arabidopsis thaliana
ttactaaagaataccgt

SEQ ID NO: 183657 - DNA, 17 bp, Arabidopsis thaliana
ttactaaagttaggact

SEQ ID NO: 183658 - DNA, 17 bp, Arabidopsis thaliana
ttactatgctgccatct

SEQ ID NO: 183659 - DNA, 17 bp, Arabidopsis thaliana
ttactatttccatcttc

SEQ ID NO: 183660 - DNA, 17 bp, Arabidopsis thaliana
ttactcaccaaattaaa

SEQ ID NO: 183661 - DNA, 17 bp, Arabidopsis thaliana
ttactcgcatcctgtag

SEQ ID NO: 183662 - DNA, 17 bp, Arabidopsis thaliana
ttactctcaaaatgatt

SEQ ID NO: 183663 - DNA, 17 bp, Arabidopsis thaliana
ttactggatttgatttc

SEQ ID NO: 183664 - DNA, 17 bp, Arabidopsis thaliana
ttactggcctgcccatt

SEQ ID NO: 183665 - DNA, 17 bp, Arabidopsis thaliana
ttacttgggaacgttgc

SEQ ID NO: 183666 - DNA, 17 bp, Arabidopsis thaliana
ttacttgtgttgcatct

SEQ ID NO: 183667 - DNA, 17 bp, Arabidopsis thaliana
ttacttttcctgacgct

SEQ ID NO: 183668 - DNA, 17 bp, Arabidopsis thaliana
ttacttttgtgtgacta

SEQ ID NO: 183669 - DNA, 17 bp, Arabidopsis thaliana
ttacttttgtgtgactg

SEQ ID NO: 183670 - DNA, 17 bp, Arabidopsis thaliana
ttagaaaattattctaa

SEQ ID NO: 183671 - DNA, 17 bp, Arabidopsis thaliana
ttagaaacggtctttgg

SEQ ID NO: 183672 - DNA, 17 bp, Arabidopsis thaliana
ttagaaagaaaaaaaaa

SEQ ID NO: 183673 - DNA, 17 bp, Arabidopsis thaliana
ttagaaagtctcgtact

SEQ ID NO: 183674 - DNA, 17 bp, Arabidopsis thaliana
ttagaaatggatctgaa

SEQ ID NO: 183675 - DNA, 17 bp, Arabidopsis thaliana
ttagaaatttaggatac

SEQ ID NO: 183676 - DNA, 17 bp, Arabidopsis thaliana
ttagaaattttgtttca

SEQ ID NO: 183677 - DNA, 17 bp, Arabidopsis thaliana
ttagaaattttgtttcg

SEQ ID NO: 183678 - DNA, 17 bp, Arabidopsis thaliana
ttagaaattttgtttct

SEQ ID NO: 183679 - DNA, 17 bp, Arabidopsis thaliana
ttagaagatttttcttg

SEQ ID NO: 183680 - DNA, 17 bp, Arabidopsis thaliana
ttagaataaggttgcgg

SEQ ID NO: 183681 - DNA, 17 bp, Arabidopsis thaliana
ttagaatgtgatgcaaa

SEQ ID NO: 183682 - DNA, 17 bp, Arabidopsis thaliana
ttagacgacttgaaaat

SEQ ID NO: 183683 - DNA, 17 bp, Arabidopsis thaliana
ttagacgaggccaagca

SEQ ID NO: 183684 - DNA, 17 bp, Arabidopsis thaliana
ttagacggactatggcc

SEQ ID NO: 183685 - DNA, 17 bp, Arabidopsis thaliana
ttagagctaagttcagc

SEQ ID NO: 183686 - DNA, 17 bp, Arabidopsis thaliana
ttagagggacaatattt

SEQ ID NO: 183687 - DNA, 17 bp, Arabidopsis thaliana
ttagaggtagagataga

SEQ ID NO: 183688 - DNA, 17 bp, Arabidopsis thaliana
ttagaggttgtagatat

SEQ ID NO: 183689 - DNA, 17 bp, Arabidopsis thaliana
ttagagttgtgaatgta

SEQ ID NO: 183690 - DNA, 17 bp, Arabidopsis thaliana
ttagagttttctggata

SEQ ID NO: 183691 - DNA, 17 bp, Arabidopsis thaliana
ttagataaaaggtcgac

SEQ ID NO: 183692 - DNA, 17 bp, Arabidopsis thaliana
ttagatacactctgatg

SEQ ID NO: 183693 - DNA, 17 bp, Arabidopsis thaliana
ttagatatgaggtgctt

SEQ ID NO: 183694 - DNA, 17 bp, Arabidopsis thaliana
ttagatcgccggtggtg

SEQ ID NO: 183695 - DNA, 17 bp, Arabidopsis thaliana
ttagatctgacaatcat

SEQ ID NO: 183696 - DNA, 17 bp, Arabidopsis thaliana
ttagatgaccatcaaca

SEQ ID NO: 183697 - DNA, 17 bp, Arabidopsis thaliana
ttagatgttctgggccg

SEQ ID NO: 183698 - DNA, 17 bp, Arabidopsis thaliana
ttagattactctcaaaa

SEQ ID NO: 183699 - DNA, 17 bp, Arabidopsis thaliana
ttagattcacgcacaaa

SEQ ID NO: 183700 - DNA, 17 bp, Arabidopsis thaliana
ttagattcacgcactca

SEQ ID NO: 183701 - DNA, 17 bp, Arabidopsis thaliana
ttagattcccgcacaaa

SEQ ID NO: 183702 - DNA, 17 bp, Arabidopsis thaliana
ttagattctcgcacaaa

SEQ ID NO: 183703 - DNA, 17 bp, Arabidopsis thaliana
ttagattgccagttttg

SEQ ID NO: 183704 - DNA, 17 bp, Arabidopsis thaliana
ttagcaactgttcttta

SEQ ID NO: 183705 - DNA, 17 bp, Arabidopsis thaliana
ttagcaggctgaggtct

SEQ ID NO: 183706 - DNA, 17 bp, Arabidopsis thaliana
ttagccaaaaggccgag

SEQ ID NO: 183707 - DNA, 17 bp, Arabidopsis thaliana
ttagccaaggatgactt

SEQ ID NO: 183708 - DNA, 17 bp, Arabidopsis thaliana
ttagccgcatcctgtag

SEQ ID NO: 183709 - DNA, 17 bp, Arabidopsis thaliana
ttagcctctgtggtagc

SEQ ID NO: 183710 - DNA, 17 bp, Arabidopsis thaliana
ttagccttacaaaatcc

SEQ ID NO: 183711 - DNA, 17 bp, Arabidopsis thaliana
ttagcgacaaagggatc

SEQ ID NO: 183712 - DNA, 17 bp, Arabidopsis thaliana
ttagcgacaaagggcga

SEQ ID NO: 183713 - DNA, 17 bp, Arabidopsis thaliana
ttagcgacaaagggctg

SEQ ID NO: 183714 - DNA, 17 bp, Arabidopsis thaliana
ttagcgcatcctgtaga

SEQ ID NO: 183715 - DNA, 17 bp, Arabidopsis thaliana
ttagctaaaaccgcagc

SEQ ID NO: 183716 - DNA, 17 bp, Arabidopsis thaliana
ttagctgcgtcattgca

SEQ ID NO: 183717 - DNA, 17 bp, Arabidopsis thaliana
ttagctgcgtcattgcc

SEQ ID NO: 183718 - DNA, 17 bp, Arabidopsis thaliana
ttagcttccgactcatt

SEQ ID NO: 183719 - DNA, 17 bp, Arabidopsis thaliana
ttagctttgctctgtcc

SEQ ID NO: 183720 - DNA, 17 bp, Arabidopsis thaliana
ttaggaaaaccccattc

SEQ ID NO: 183721 - DNA, 17 bp, Arabidopsis thaliana
ttaggaaattattctaa

SEQ ID NO: 183722 - DNA, 17 bp, Arabidopsis thaliana
ttaggatcgtagcctgt

SEQ ID NO: 183723 - DNA, 17 bp, Arabidopsis thaliana
ttaggcaactttcgata

SEQ ID NO: 183724 - DNA, 17 bp, Arabidopsis thaliana
ttaggcaactttcggta

SEQ ID NO: 183725 - DNA, 17 bp, Arabidopsis thaliana
ttaggctcccaaaggca

SEQ ID NO: 183726 - DNA, 17 bp, Arabidopsis thaliana
ttagggaagtactttaa

SEQ ID NO: 183727 - DNA, 17 bp, Arabidopsis thaliana
ttagggtctaatctaga

SEQ ID NO: 183728 - DNA, 17 bp, Arabidopsis thaliana
ttaggtaagttttcaaa

SEQ ID NO: 183729 - DNA, 17 bp, Arabidopsis thaliana
ttaggtacgaaacacag

SEQ ID NO: 183730 - DNA, 17 bp, Arabidopsis thaliana
ttaggtgcttcgtagcc

SEQ ID NO: 183731 - DNA, 17 bp, Arabidopsis thaliana
ttaggtggctttgatac

SEQ ID NO: 183732 - DNA, 17 bp, Arabidopsis thaliana
ttaggttcaaacactag

SEQ ID NO: 183733 - DNA, 17 bp, Arabidopsis thaliana
ttagtaggcccaggata

SEQ ID NO: 183734 - DNA, 17 bp, Arabidopsis thaliana
ttagtcgcaacctgtct

SEQ ID NO: 183735 - DNA, 17 bp, Arabidopsis thaliana
ttagtcgcatccgtaga

SEQ ID NO: 183736 - DNA, 17 bp, Arabidopsis thaliana
ttagtcgcatcctatag

SEQ ID NO: 183737 - DNA, 17 bp, Arabidopsis thaliana
ttagtcgcatcctgcag

SEQ ID NO: 183738 - DNA, 17 bp, Arabidopsis thaliana
ttagtcgcatcctggat

SEQ ID NO: 183739 - DNA, 17 bp, Arabidopsis thaliana
ttagtcgcatcctgtaa

SEQ ID NO: 183740 - DNA, 17 bp, Arabidopsis thaliana
ttagtcgcatcctgtag

SEQ ID NO: 183741 - DNA, 17 bp, Arabidopsis thaliana
ttagtcgcatcctgtct

SEQ ID NO: 183742 - DNA, 17 bp, Arabidopsis thaliana
ttagtcgcatcctgttg

SEQ ID NO: 183743 - DNA, 17 bp, Arabidopsis thaliana
ttagtcgcatctgtaga

SEQ ID NO: 183744 - DNA, 17 bp, Arabidopsis thaliana
ttagtcgcattcctgta

SEQ ID NO: 183745 - DNA, 17 bp, Arabidopsis thaliana
ttagtcgcattctgtag

SEQ ID NO: 183746 - DNA, 17 bp, Arabidopsis thaliana
ttagtcgccctgcagat

SEQ ID NO: 183747 - DNA, 17 bp, Arabidopsis thaliana
ttagtcgctcccgtaga

SEQ ID NO: 183748 - DNA, 17 bp, Arabidopsis thaliana
ttagtctcatcctgtag

SEQ ID NO: 183749 - DNA, 17 bp, Arabidopsis thaliana
ttagtctctttgcacct

SEQ ID NO: 183750 - DNA, 17 bp, Arabidopsis thaliana
ttagtgaccaagccaat

SEQ ID NO: 183751 - DNA, 17 bp, Arabidopsis thaliana
ttagtgagacgctataa

SEQ ID NO: 183752 - DNA, 17 bp, Arabidopsis thaliana
ttagtgcatcctgtaga

SEQ ID NO: 183753 - DNA, 17 bp, Arabidopsis thaliana
ttagtggaaagacgaca

SEQ ID NO: 183754 - DNA, 17 bp, Arabidopsis thaliana
ttagtggacttctcgcg

SEQ ID NO: 183755 - DNA, 17 bp, Arabidopsis thaliana
ttagtgggtgctaaaat

SEQ ID NO: 183756 - DNA, 17 bp, Arabidopsis thaliana
ttagttatgccaatgga

SEQ ID NO: 183757 - DNA, 17 bp, Arabidopsis thaliana
ttagttgaacggatgga

SEQ ID NO: 183758 - DNA, 17 bp, Arabidopsis thaliana
ttagttgaacggatggt

SEQ ID NO: 183759 - DNA, 17 bp, Arabidopsis thaliana
ttagttgaccattattg

SEQ ID NO: 183760 - DNA, 17 bp, Arabidopsis thaliana
ttagttgaccggatggt

SEQ ID NO: 183761 - DNA, 17 bp, Arabidopsis thaliana
ttagttgacggaattgt

SEQ ID NO: 183762 - DNA, 17 bp, Arabidopsis thaliana
ttagttgatcttgttag

SEQ ID NO: 183763 - DNA, 17 bp, Arabidopsis thaliana
ttagttggtggagcgat

SEQ ID NO: 183764 - DNA, 17 bp, Arabidopsis thaliana
ttagtttaaaggcttgt

SEQ ID NO: 183765 - DNA, 17 bp, Arabidopsis thaliana
ttagtttacatgcaaaa

SEQ ID NO: 183766 - DNA, 17 bp, Arabidopsis thaliana
ttagtttgctgaacaac

SEQ ID NO: 183767 - DNA, 17 bp, Arabidopsis thaliana
ttagtttggttaggaag

SEQ ID NO: 183768 - DNA, 17 bp, Arabidopsis thaliana
ttagttttaccctactg

SEQ ID NO: 183769 - DNA, 17 bp, Arabidopsis thaliana
ttataaaacaacccacg

SEQ ID NO: 183770 - DNA, 17 bp, Arabidopsis thaliana
ttataagccatcttact

SEQ ID NO: 183771 - DNA, 17 bp, Arabidopsis thaliana
ttataattaccaccgaa

SEQ ID NO: 183772 - DNA, 17 bp, Arabidopsis thaliana
ttataattaccaccgag

SEQ ID NO: 183773 - DNA, 17 bp, Arabidopsis thaliana
ttatagactcatcggct

SEQ ID NO: 183774 - DNA, 17 bp, Arabidopsis thaliana
ttataggactccgctgg

SEQ ID NO: 183775 - DNA, 17 bp, Arabidopsis thaliana
ttatagggttggatact

SEQ ID NO: 183776 - DNA, 17 bp, Arabidopsis thaliana
ttatagtatgccgctga

SEQ ID NO: 183777 - DNA, 17 bp, Arabidopsis thaliana
ttatcactttgtttacc

SEQ ID NO: 183778 - DNA, 17 bp, Arabidopsis thaliana
ttatcagtttagccagg

SEQ ID NO: 183779 - DNA, 17 bp, Arabidopsis thaliana
ttatcatcccttggttt

SEQ ID NO: 183780 - DNA, 17 bp, Arabidopsis thaliana
ttatcatccttctggtt

SEQ ID NO: 183781 - DNA, 17 bp, Arabidopsis thaliana
ttatcattcttctgggc

SEQ ID NO: 183782 - DNA, 17 bp, Arabidopsis thaliana
ttatccacagagatgat

SEQ ID NO: 183783 - DNA, 17 bp, Arabidopsis thaliana
ttatccatttcagtgaa

SEQ ID NO: 183784 - DNA, 17 bp, Arabidopsis thaliana
ttatcccacaaactaac

SEQ ID NO: 183785 - DNA, 17 bp, Arabidopsis thaliana
ttatcccacaaacttga

SEQ ID NO: 183786 - DNA, 17 bp, Arabidopsis thaliana
ttatcccccgtgttttg

SEQ ID NO: 183787 - DNA, 17 bp, Arabidopsis thaliana
ttatccggcggaccagg

SEQ ID NO: 183788 - DNA, 17 bp, Arabidopsis thaliana
ttatcctttgcagacga

SEQ ID NO: 183789 - DNA, 17 bp, Arabidopsis thaliana
ttatctagatgatgcat

SEQ ID NO: 183790 - DNA, 17 bp, Arabidopsis thaliana
ttatctccaccacattc

SEQ ID NO: 183791 - DNA, 17 bp, Arabidopsis thaliana
ttatctcgaatttggaa

SEQ ID NO: 183792 - DNA, 17 bp, Arabidopsis thaliana
ttatcttcgatgtgcgc

SEQ ID NO: 183793 - DNA, 17 bp, Arabidopsis thaliana
ttatgactgaacgcctc

SEQ ID NO: 183794 - DNA, 17 bp, Arabidopsis thaliana
ttatgaggtcggtaatg

SEQ ID NO: 183795 - DNA, 17 bp, Arabidopsis thaliana
ttatgatggtagtccaa

SEQ ID NO: 183796 - DNA, 17 bp, Arabidopsis thaliana
ttatgatgtgtcatgaa

SEQ ID NO: 183797 - DNA, 17 bp, Arabidopsis thaliana
ttatgccaatggattta

SEQ ID NO: 183798 - DNA, 17 bp, Arabidopsis thaliana
ttatgccaatggatttt

SEQ ID NO: 183799 - DNA, 17 bp, Arabidopsis thaliana
ttatggaagaaattgta

SEQ ID NO: 183800 - DNA, 17 bp, Arabidopsis thaliana
ttatggaagtactttaa

SEQ ID NO: 183801 - DNA, 17 bp, Arabidopsis thaliana
ttatgggcttttgagac

SEQ ID NO: 183802 - DNA, 17 bp, Arabidopsis thaliana
ttatgttgaaaaagcca

SEQ ID NO: 183803 - DNA, 17 bp, Arabidopsis thaliana
ttatgttgaaaaagccc

SEQ ID NO: 183804 - DNA, 17 bp, Arabidopsis thaliana
ttattaaactaaacaat

SEQ ID NO: 183805 - DNA, 17 bp, Arabidopsis thaliana
ttattagtgagacgcta

SEQ ID NO: 183806 - DNA, 17 bp, Arabidopsis thaliana
ttattagtttacatgca

SEQ ID NO: 183807 - DNA, 17 bp, Arabidopsis thaliana
ttattctaagtccaaca

SEQ ID NO: 183808 - DNA, 17 bp, Arabidopsis thaliana
ttattctctttttcttg

SEQ ID NO: 183809 - DNA, 17 bp, Arabidopsis thaliana
ttattggccttttgcat

SEQ ID NO: 183810 - DNA, 17 bp, Arabidopsis thaliana
ttattggccttttgttt

SEQ ID NO: 183811 - DNA, 17 bp, Arabidopsis thaliana
ttattgtcgtccagcgg

SEQ ID NO: 183812 - DNA, 17 bp, Arabidopsis thaliana
ttattgtgttttatcta

SEQ ID NO: 183813 - DNA, 17 bp, Arabidopsis thaliana
ttatttgcctattgtag

SEQ ID NO: 183814 - DNA, 17 bp, Arabidopsis thaliana
ttatttggatgctgctc

SEQ ID NO: 183815 - DNA, 17 bp, Arabidopsis thaliana
ttattttctaattttca

SEQ ID NO: 183816 - DNA, 17 bp, Arabidopsis thaliana
ttcaaaactggttcggt

SEQ ID NO: 183817 - DNA, 17 bp, Arabidopsis thaliana
ttcaaaatcagccaggt

SEQ ID NO: 183818 - DNA, 17 bp, Arabidopsis thaliana
ttcaaaattgacccgaa

SEQ ID NO: 183819 - DNA, 17 bp, Arabidopsis thaliana
ttcaaacactaggttcg

SEQ ID NO: 183820 - DNA, 17 bp, Arabidopsis thaliana
ttcaaaccccacttctg

SEQ ID NO: 183821 - DNA, 17 bp, Arabidopsis thaliana
ttcaaacttttggactc

SEQ ID NO: 183822 - DNA, 17 bp, Arabidopsis thaliana
ttcaaagattacccggg

SEQ ID NO: 183823 - DNA, 17 bp, Arabidopsis thaliana
ttcaaagctgccagtaa

SEQ ID NO: 183824 - DNA, 17 bp, Arabidopsis thaliana
ttcaaagctgccagtag

SEQ ID NO: 183825 - DNA, 17 bp, Arabidopsis thaliana
ttcaaagctgccagtca

SEQ ID NO: 183826 - DNA, 17 bp, Arabidopsis thaliana
ttcaaaggcaactggaa

SEQ ID NO: 183827 - DNA, 17 bp, Arabidopsis thaliana
ttcaaagggatcgcatt

SEQ ID NO: 183828 - DNA, 17 bp, Arabidopsis thaliana
ttcaaagtgactacatc

SEQ ID NO: 183829 - DNA, 17 bp, Arabidopsis thaliana
ttcaaatccgggtgccg

SEQ ID NO: 183830 - DNA, 17 bp, Arabidopsis thaliana
ttcaaatcctacagagc

SEQ ID NO: 183831 - DNA, 17 bp, Arabidopsis thaliana
ttcaaatcctacttact

SEQ ID NO: 183832 - DNA, 17 bp, Arabidopsis thaliana
ttcaaatcctacttggg

SEQ ID NO: 183833 - DNA, 17 bp, Arabidopsis thaliana
ttcaaatcctattggac

SEQ ID NO: 183834 - DNA, 17 bp, Arabidopsis thaliana
ttcaacgaggaattcaa

SEQ ID NO: 183835 - DNA, 17 bp, Arabidopsis thaliana
ttcaacggctcagcgac

SEQ ID NO: 183836 - DNA, 17 bp, Arabidopsis thaliana
ttcaacgtttactatgc

SEQ ID NO: 183837 - DNA, 17 bp, Arabidopsis thaliana
ttcaagaggacttggaa

SEQ ID NO: 183838 - DNA, 17 bp, Arabidopsis thaliana
ttcaagcgaatgatgaa

SEQ ID NO: 183839 - DNA, 17 bp, Arabidopsis thaliana
ttcaagcgaatgatgat

SEQ ID NO: 183840 - DNA, 17 bp, Arabidopsis thaliana
ttcaagctcagcaactg

SEQ ID NO: 183841 - DNA, 17 bp, Arabidopsis thaliana
ttcaagctcgtcaatcg

SEQ ID NO: 183842 - DNA, 17 bp, Arabidopsis thaliana
ttcaaggacagattgga

SEQ ID NO: 183843 - DNA, 17 bp, Arabidopsis thaliana
ttcaaggagaaacctct

SEQ ID NO: 183844 - DNA, 17 bp, Arabidopsis thaliana
ttcaaggcggtccgaac

SEQ ID NO: 183845 - DNA, 17 bp, Arabidopsis thaliana
ttcaagtaaatgagatt

SEQ ID NO: 183846 - DNA, 17 bp, Arabidopsis thaliana
ttcaagtcgtctaaaga

SEQ ID NO: 183847 - DNA, 17 bp, Arabidopsis thaliana
ttcaagtcttctattga

SEQ ID NO: 183848 - DNA, 17 bp, Arabidopsis thaliana
ttcaattctcggaacgc

SEQ ID NO: 183849 - DNA, 17 bp, Arabidopsis thaliana
ttcacaagagactttta

SEQ ID NO: 183850 - DNA, 17 bp, Arabidopsis thaliana
ttcacaagagacttttt

SEQ ID NO: 183851 - DNA, 17 bp, Arabidopsis thaliana
ttcacaagagtcttttt

SEQ ID NO: 183852 - DNA, 17 bp, Arabidopsis thaliana
ttcacatgcatcgccat

SEQ ID NO: 183853 - DNA, 17 bp, Arabidopsis thaliana
ttcacatttcgttcatc

SEQ ID NO: 183854 - DNA, 17 bp, Arabidopsis thaliana
ttcaccaagccaagaag

SEQ ID NO: 183855 - DNA, 17 bp, Arabidopsis thaliana
ttcaccactagaccaaa

SEQ ID NO: 183856 - DNA, 17 bp, Arabidopsis thaliana
ttcacccatcgatgtgc

SEQ ID NO: 183857 - DNA, 17 bp, Arabidopsis thaliana
ttcacgaaacggaggac

SEQ ID NO: 183858 - DNA, 17 bp, Arabidopsis thaliana
ttcactatggagctcga

SEQ ID NO: 183859 - DNA, 17 bp, Arabidopsis thaliana
ttcactgagattcagcc

SEQ ID NO: 183860 - DNA, 17 bp, Arabidopsis thaliana
ttcacttgcagagagaa

SEQ ID NO: 183861 - DNA, 17 bp, Arabidopsis thaliana
ttcagacacaatcctct

SEQ ID NO: 183862 - DNA, 17 bp, Arabidopsis thaliana
ttcagacccatttctaa

SEQ ID NO: 183863 - DNA, 17 bp, Arabidopsis thaliana
ttcagactgtgaaactg

SEQ ID NO: 183864 - DNA, 17 bp, Arabidopsis thaliana
ttcagatccatttctaa

SEQ ID NO: 183865 - DNA, 17 bp, Arabidopsis thaliana
ttcagatccatttctca

SEQ ID NO: 183866 - DNA, 17 bp, Arabidopsis thaliana
ttcagcaggttcttctc

SEQ ID NO: 183867 - DNA, 17 bp, Arabidopsis thaliana
ttcagcagtcggaaggc

SEQ ID NO: 183868 - DNA, 17 bp, Arabidopsis thaliana
ttcagcatcggcatagc

SEQ ID NO: 183869 - DNA, 17 bp, Arabidopsis thaliana
ttcagccctttgtcgct

SEQ ID NO: 183870 - DNA, 17 bp, Arabidopsis thaliana
ttcagccgtcggatact

SEQ ID NO: 183871 - DNA, 17 bp, Arabidopsis thaliana
ttcagcgagaagaagaa

SEQ ID NO: 183872 - DNA, 17 bp, Arabidopsis thaliana
ttcaggagaacatgatc

SEQ ID NO: 183873 - DNA, 17 bp, Arabidopsis thaliana
ttcaggctctgtgttgg

SEQ ID NO: 183874 - DNA, 17 bp, Arabidopsis thaliana
ttcagggacgaaggctc

SEQ ID NO: 183875 - DNA, 17 bp, Arabidopsis thaliana
ttcaggtctcggtggga

SEQ ID NO: 183876 - DNA, 17 bp, Arabidopsis thaliana
ttcaggtggggagtttg

SEQ ID NO: 183877 - DNA, 17 bp, Arabidopsis thaliana
ttcagtcaatctacgca

SEQ ID NO: 183878 - DNA, 17 bp, Arabidopsis thaliana
ttcagtctgggctttgt

SEQ ID NO: 183879 - DNA, 17 bp, Arabidopsis thaliana
ttcagtgaacagattga

SEQ ID NO: 183880 - DNA, 17 bp, Arabidopsis thaliana
ttcagtttagatttcgg

SEQ ID NO: 183881 - DNA, 17 bp, Arabidopsis thaliana
ttcataaggttcgtatt

SEQ ID NO: 183882 - DNA, 17 bp, Arabidopsis thaliana
ttcataccaaaaaaatc

SEQ ID NO: 183883 - DNA, 17 bp, Arabidopsis thaliana
ttcataccagtttcacc

SEQ ID NO: 183884 - DNA, 17 bp, Arabidopsis thaliana
ttcatcagctcgcgttg

SEQ ID NO: 183885 - DNA, 17 bp, Arabidopsis thaliana
ttcatcgtgatggggat

SEQ ID NO: 183886 - DNA, 17 bp, Arabidopsis thaliana
ttcatcgttgcgtgtaa

SEQ ID NO: 183887 - DNA, 17 bp, Arabidopsis thaliana
ttcatctacaatcatag

SEQ ID NO: 183888 - DNA, 17 bp, Arabidopsis thaliana
ttcatctacctgttgag

SEQ ID NO: 183889 - DNA, 17 bp, Arabidopsis thaliana
ttcatctagttagatat

SEQ ID NO: 183890 - DNA, 17 bp, Arabidopsis thaliana
ttcatgtcgaatgttag

SEQ ID NO: 183891 - DNA, 17 bp, Arabidopsis thaliana
ttcattacgagaccttc

SEQ ID NO: 183892 - DNA, 17 bp, Arabidopsis thaliana
ttcattcaccacatcag

SEQ ID NO: 183893 - DNA, 17 bp, Arabidopsis thaliana
ttcattcattgtttgtc

SEQ ID NO: 183894 - DNA, 17 bp, Arabidopsis thaliana
ttcattcgggctggatt

SEQ ID NO: 183895 - DNA, 17 bp, Arabidopsis thaliana
ttcattgtccattgacg

SEQ ID NO: 183896 - DNA, 17 bp, Arabidopsis thaliana
ttcattgtctgttcgac

SEQ ID NO: 183897 - DNA, 17 bp, Arabidopsis thaliana
ttcatttctcggaatgc

SEQ ID NO: 183898 - DNA, 17 bp, Arabidopsis thaliana
ttcatttctcggtagaa

SEQ ID NO: 183899 - DNA, 17 bp, Arabidopsis thaliana
ttccaaaaaccactgaa

SEQ ID NO: 183900 - DNA, 17 bp, Arabidopsis thaliana
ttccaaaaaccactgat

SEQ ID NO: 183901 - DNA, 17 bp, Arabidopsis thaliana
ttccaaaaggagtcgag

SEQ ID NO: 183902 - DNA, 17 bp, Arabidopsis thaliana
ttccaaacccttgcagc

SEQ ID NO: 183903 - DNA, 17 bp, Arabidopsis thaliana
ttccaaagttttgatct

SEQ ID NO: 183904 - DNA, 17 bp, Arabidopsis thaliana
ttccaaatgtagacaaa

SEQ ID NO: 183905 - DNA, 17 bp, Arabidopsis thaliana
ttccaaattcgagataa

SEQ ID NO: 183906 - DNA, 17 bp, Arabidopsis thaliana
ttccaagctaacgatgc

SEQ ID NO: 183907 - DNA, 17 bp, Arabidopsis thaliana
ttccaagtccaacatag

SEQ ID NO: 183908 - DNA, 17 bp, Arabidopsis thaliana
ttccaagtcctcttcaa

SEQ ID NO: 183909 - DNA, 17 bp, Arabidopsis thaliana
ttccacaactccggcca

SEQ ID NO: 183910 - DNA, 17 bp, Arabidopsis thaliana
ttccacaactttcttga

SEQ ID NO: 183911 - DNA, 17 bp, Arabidopsis thaliana
ttccacagccttcttga

SEQ ID NO: 183912 - DNA, 17 bp, Arabidopsis thaliana
ttccacagctctttgaa

SEQ ID NO: 183913 - DNA, 17 bp, Arabidopsis thaliana
ttccacagcttcttgaa

SEQ ID NO: 183914 - DNA, 17 bp, Arabidopsis thaliana
ttccacagctttcctga

SEQ ID NO: 183915 - DNA, 17 bp, Arabidopsis thaliana
ttccacagctttctcga

SEQ ID NO: 183916 - DNA, 17 bp, Arabidopsis thaliana
ttccacagctttcttga

SEQ ID NO: 183917 - DNA, 17 bp, Arabidopsis thaliana
ttccacagctttcttgc

SEQ ID NO: 183918 - DNA, 17 bp, Arabidopsis thaliana
ttccacagctttttgaa

SEQ ID NO: 183919 - DNA, 17 bp, Arabidopsis thaliana
ttccacagcttttttga

SEQ ID NO: 183920 - DNA, 17 bp, Arabidopsis thaliana
ttccacagttttcttga

SEQ ID NO: 183921 - DNA, 17 bp, Arabidopsis thaliana
ttccactaagcagattt

SEQ ID NO: 183922 - DNA, 17 bp, Arabidopsis thaliana
ttccagaccttctctac

SEQ ID NO: 183923 - DNA, 17 bp, Arabidopsis thaliana
ttccaggccgagctccg

SEQ ID NO: 183924 - DNA, 17 bp, Arabidopsis thaliana
ttccagggacgcgttaa

SEQ ID NO: 183925 - DNA, 17 bp, Arabidopsis thaliana
ttccaggtaatcggcag

SEQ ID NO: 183926 - DNA, 17 bp, Arabidopsis thaliana
ttccaggtagtcggcag

SEQ ID NO: 183927 - DNA, 17 bp, Arabidopsis thaliana
ttccaggttgcgatgga

SEQ ID NO: 183928 - DNA, 17 bp, Arabidopsis thaliana
ttccataagtcggggtg

SEQ ID NO: 183929 - DNA, 17 bp, Arabidopsis thaliana
ttccataagtcttttgc

SEQ ID NO: 183930 - DNA, 17 bp, Arabidopsis thaliana
ttccatgtagagattag

SEQ ID NO: 183931 - DNA, 17 bp, Arabidopsis thaliana
ttccattggtacgaacg

SEQ ID NO: 183932 - DNA, 17 bp, Arabidopsis thaliana
ttcccaaaaggagtcga

SEQ ID NO: 183933 - DNA, 17 bp, Arabidopsis thaliana
ttcccaaatgtagacaa

SEQ ID NO: 183934 - DNA, 17 bp, Arabidopsis thaliana
ttcccaaatgtagatag

SEQ ID NO: 183935 - DNA, 17 bp, Arabidopsis thaliana
ttcccaaatgtatacaa

SEQ ID NO: 183936 - DNA, 17 bp, Arabidopsis thaliana
ttcccaagtaaataggt

SEQ ID NO: 183937 - DNA, 17 bp, Arabidopsis thaliana
ttcccacaaacttgatc

SEQ ID NO: 183938 - DNA, 17 bp, Arabidopsis thaliana
ttcccagctggaccacc

SEQ ID NO: 183939 - DNA, 17 bp, Arabidopsis thaliana
ttccccaacggcaacca

SEQ ID NO: 183940 - DNA, 17 bp, Arabidopsis thaliana
ttccccacagacggcgc

SEQ ID NO: 183941 - DNA, 17 bp, Arabidopsis thaliana
ttccccgcaagaagcca

SEQ ID NO: 183942 - DNA, 17 bp, Arabidopsis thaliana
ttccccgcaagaagccg

SEQ ID NO: 183943 - DNA, 17 bp, Arabidopsis thaliana
ttccccgggcgtcgaac

SEQ ID NO: 183944 - DNA, 17 bp, Arabidopsis thaliana
ttccccggtactcttac

SEQ ID NO: 183945 - DNA, 17 bp, Arabidopsis thaliana
ttcccctgtggtcgacc

SEQ ID NO: 183946 - DNA, 17 bp, Arabidopsis thaliana
ttcccgagttgtatcaa

SEQ ID NO: 183947 - DNA, 17 bp, Arabidopsis thaliana
ttcccgagttgtatgta

SEQ ID NO: 183948 - DNA, 17 bp, Arabidopsis thaliana
ttcccgctggatccgcc

SEQ ID NO: 183949 - DNA, 17 bp, Arabidopsis thaliana
ttcccgcttacagcagt

SEQ ID NO: 183950 - DNA, 17 bp, Arabidopsis thaliana
ttcccggctggtgcacc

SEQ ID NO: 183951 - DNA, 17 bp, Arabidopsis thaliana
ttcccggttcgcgatcc

SEQ ID NO: 183952 - DNA, 17 bp, Arabidopsis thaliana
ttcccggttcgctcgcc

SEQ ID NO: 183953 - DNA, 17 bp, Arabidopsis thaliana
ttccctcaggatagctg

SEQ ID NO: 183954 - DNA, 17 bp, Arabidopsis thaliana
ttccctgtagaaagata

SEQ ID NO: 183955 - DNA, 17 bp, Arabidopsis thaliana
ttccctgtagaaagatt

SEQ ID NO: 183956 - DNA, 17 bp, Arabidopsis thaliana
ttcccttacaatgtcga

SEQ ID NO: 183957 - DNA, 17 bp, Arabidopsis thaliana
ttccctttccctttcta

SEQ ID NO: 183958 - DNA, 17 bp, Arabidopsis thaliana
ttccctttctacattgt

SEQ ID NO: 183959 - DNA, 17 bp, Arabidopsis thaliana
ttccgacaaaagatctg

SEQ ID NO: 183960 - DNA, 17 bp, Arabidopsis thaliana
ttccgagcactacctca

SEQ ID NO: 183961 - DNA, 17 bp, Arabidopsis thaliana
ttccgatgggcttggag

SEQ ID NO: 183962 - DNA, 17 bp, Arabidopsis thaliana
ttccgatgttgaggacg

SEQ ID NO: 183963 - DNA, 17 bp, Arabidopsis thaliana
ttccgattggcaataca

SEQ ID NO: 183964 - DNA, 17 bp, Arabidopsis thaliana
ttccgcagctttcttga

SEQ ID NO: 183965 - DNA, 17 bp, Arabidopsis thaliana
ttccgcggcgagagcgg

SEQ ID NO: 183966 - DNA, 17 bp, Arabidopsis thaliana
ttccggacatctcccat

SEQ ID NO: 183967 - DNA, 17 bp, Arabidopsis thaliana
ttccggcggggcccgaa

SEQ ID NO: 183968 - DNA, 17 bp, Arabidopsis thaliana
ttccggggcctgtgttt

SEQ ID NO: 183969 - DNA, 17 bp, Arabidopsis thaliana
ttccggtggtctcggac

SEQ ID NO: 183970 - DNA, 17 bp, Arabidopsis thaliana
ttccgtccaaggctaaa

SEQ ID NO: 183971 - DNA, 17 bp, Arabidopsis thaliana
ttccgtcccgcatcagc

SEQ ID NO: 183972 - DNA, 17 bp, Arabidopsis thaliana
ttccgttaacgaacgag

SEQ ID NO: 183973 - DNA, 17 bp, Arabidopsis thaliana
ttccgttgtctgttcga

SEQ ID NO: 183974 - DNA, 17 bp, Arabidopsis thaliana
ttccgttgtctgtttgt

SEQ ID NO: 183975 - DNA, 17 bp, Arabidopsis thaliana
ttcctaaaacaaatatc

SEQ ID NO: 183976 - DNA, 17 bp, Arabidopsis thaliana
ttcctaaccaaactaac

SEQ ID NO: 183977 - DNA, 17 bp, Arabidopsis thaliana
ttcctaatactactagg

SEQ ID NO: 183978 - DNA, 17 bp, Arabidopsis thaliana
ttcctacaaaatcctga

SEQ ID NO: 183979 - DNA, 17 bp, Arabidopsis thaliana
ttcctactgaattgtca

SEQ ID NO: 183980 - DNA, 17 bp, Arabidopsis thaliana
ttcctatgaacagatga

SEQ ID NO: 183981 - DNA, 17 bp, Arabidopsis thaliana
ttcctcatattggcttc

SEQ ID NO: 183982 - DNA, 17 bp, Arabidopsis thaliana
ttcctccgtcaggttcg

SEQ ID NO: 183983 - DNA, 17 bp, Arabidopsis thaliana
ttcctcctgtttccgtg

SEQ ID NO: 183984 - DNA, 17 bp, Arabidopsis thaliana
ttcctcggatcggttct

SEQ ID NO: 183985 - DNA, 17 bp, Arabidopsis thaliana
ttcctcgttgaagacca

SEQ ID NO: 183986 - DNA, 17 bp, Arabidopsis thaliana
ttcctctttgtttacca

SEQ ID NO: 183987 - DNA, 17 bp, Arabidopsis thaliana
ttcctgcgcctggatgt

SEQ ID NO: 183988 - DNA, 17 bp, Arabidopsis thaliana
ttcctggcttggtgaaa

SEQ ID NO: 183989 - DNA, 17 bp, Arabidopsis thaliana
ttccttaacaattctgt

SEQ ID NO: 183990 - DNA, 17 bp, Arabidopsis thaliana
ttccttatcccatatgc

SEQ ID NO: 183991 - DNA, 17 bp, Arabidopsis thaliana
ttccttattttgttccc

SEQ ID NO: 183992 - DNA, 17 bp, Arabidopsis thaliana
ttccttcaatccaaaca

SEQ ID NO: 183993 - DNA, 17 bp, Arabidopsis thaliana
ttccttgcggttgtggc

SEQ ID NO: 183994 - DNA, 17 bp, Arabidopsis thaliana
ttccttggctgcaatct

SEQ ID NO: 183995 - DNA, 17 bp, Arabidopsis thaliana
ttccttggtgttggcct

SEQ ID NO: 183996 - DNA, 17 bp, Arabidopsis thaliana
ttccttgtctgttcgac

SEQ ID NO: 183997 - DNA, 17 bp, Arabidopsis thaliana
ttcctttccgggtgtgc

SEQ ID NO: 183998 - DNA, 17 bp, Arabidopsis thaliana
ttcctttggaccagctg

SEQ ID NO: 183999 - DNA, 17 bp, Arabidopsis thaliana
ttcctttgggagcctaa

SEQ ID NO: 184000 - DNA, 17 bp, Arabidopsis thaliana
ttcgaaaactcaaccta

SEQ ID NO: 184001 - DNA, 17 bp, Arabidopsis thaliana
ttcgaaaactcaacctc

SEQ ID NO: 184002 - DNA, 17 bp, Arabidopsis thaliana
ttcgaaacctgcatggg

SEQ ID NO: 184003 - DNA, 17 bp, Arabidopsis thaliana
ttcgaaagaggccccga

SEQ ID NO: 184004 - DNA, 17 bp, Arabidopsis thaliana
ttcgaaccccggcgaga

SEQ ID NO: 184005 - DNA, 17 bp, Arabidopsis thaliana
ttcgaacccgggcgaag

SEQ ID NO: 184006 - DNA, 17 bp, Arabidopsis thaliana
ttcgaacccgggctcag

SEQ ID NO: 184007 - DNA, 17 bp, Arabidopsis thaliana
ttcgaacccgggctctg

SEQ ID NO: 184008 - DNA, 17 bp, Arabidopsis thaliana
ttcgaagtcctcttcaa

SEQ ID NO: 184009 - DNA, 17 bp, Arabidopsis thaliana
ttcgaatcccggcgaga

SEQ ID NO: 184010 - DNA, 17 bp, Arabidopsis thaliana
ttcgaatcctacttact

SEQ ID NO: 184011 - DNA, 17 bp, Arabidopsis thaliana
ttcgaatcctacttggg

SEQ ID NO: 184012 - DNA, 17 bp, Arabidopsis thaliana
ttcgaatcctgcctctc

SEQ ID NO: 184013 - DNA, 17 bp, Arabidopsis thaliana
ttcgaatcctgtcacct

SEQ ID NO: 184014 - DNA, 17 bp, Arabidopsis thaliana
ttcgaatcctgtccccg

SEQ ID NO: 184015 - DNA, 17 bp, Arabidopsis thaliana
ttcgaatctctcaggca

SEQ ID NO: 184016 - DNA, 17 bp, Arabidopsis thaliana
ttcgaatgggtgtacct

SEQ ID NO: 184017 - DNA, 17 bp, Arabidopsis thaliana
ttcgaattcgggcgaag

SEQ ID NO: 184018 - DNA, 17 bp, Arabidopsis thaliana
ttcgaattttgtctagt

SEQ ID NO: 184019 - DNA, 17 bp, Arabidopsis thaliana
ttcgacaaagtgaaggg

SEQ ID NO: 184020 - DNA, 17 bp, Arabidopsis thaliana
ttcgacgaacaagacga

SEQ ID NO: 184021 - DNA, 17 bp, Arabidopsis thaliana
ttcgacggcattacgga

SEQ ID NO: 184022 - DNA, 17 bp, Arabidopsis thaliana
ttcgactcccggtagga

SEQ ID NO: 184023 - DNA, 17 bp, Arabidopsis thaliana
ttcgactccgtccttcc

SEQ ID NO: 184024 - DNA, 17 bp, Arabidopsis thaliana
ttcgactcgtatttggt

SEQ ID NO: 184025 - DNA, 17 bp, Arabidopsis thaliana
ttcgactcttctacggc

SEQ ID NO: 184026 - DNA, 17 bp, Arabidopsis thaliana
ttcgacttactgttgga

SEQ ID NO: 184027 - DNA, 17 bp, Arabidopsis thaliana
ttcgacttcccctgggg

SEQ ID NO: 184028 - DNA, 17 bp, Arabidopsis thaliana
ttcgaggcctattaaac

SEQ ID NO: 184029 - DNA, 17 bp, Arabidopsis thaliana
ttcgagtcccgggcaac

SEQ ID NO: 184030 - DNA, 17 bp, Arabidopsis thaliana
ttcgagtcctcttcaag

SEQ ID NO: 184031 - DNA, 17 bp, Arabidopsis thaliana
ttcgagtctggtaattg

SEQ ID NO: 184032 - DNA, 17 bp, Arabidopsis thaliana
ttcgagtgttcttgcaa

SEQ ID NO: 184033 - DNA, 17 bp, Arabidopsis thaliana
ttcgagttccgggcgcc

SEQ ID NO: 184034 - DNA, 17 bp, Arabidopsis thaliana
ttcgataattgtagata

SEQ ID NO: 184035 - DNA, 17 bp, Arabidopsis thaliana
ttcgatagttggtgacg

SEQ ID NO: 184036 - DNA, 17 bp, Arabidopsis thaliana
ttcgatatgttgaactt

SEQ ID NO: 184037 - DNA, 17 bp, Arabidopsis thaliana
ttcgatcccccgcatca

SEQ ID NO: 184038 - DNA, 17 bp, Arabidopsis thaliana
ttcgatccctgtatagg

SEQ ID NO: 184039 - DNA, 17 bp, Arabidopsis thaliana
ttcgatcctattgtgtt

SEQ ID NO: 184040 - DNA, 17 bp, Arabidopsis thaliana
ttcgatcctgcgtgtgg

SEQ ID NO: 184041 - DNA, 17 bp, Arabidopsis thaliana
ttcgatcctgggcagca

SEQ ID NO: 184042 - DNA, 17 bp, Arabidopsis thaliana
ttcgatgactagcagtg

SEQ ID NO: 184043 - DNA, 17 bp, Arabidopsis thaliana
ttcgatggtaggatagt

SEQ ID NO: 184044 - DNA, 17 bp, Arabidopsis thaliana
ttcgatgtccagcagtg

SEQ ID NO: 184045 - DNA, 17 bp, Arabidopsis thaliana
ttcgatgtcggctcttc

SEQ ID NO: 184046 - DNA, 17 bp, Arabidopsis thaliana
ttcgatgtctagcaagc

SEQ ID NO: 184047 - DNA, 17 bp, Arabidopsis thaliana
ttcgatgtctagcagtc

SEQ ID NO: 184048 - DNA, 17 bp, Arabidopsis thaliana
ttcgatgtctagcagtg

SEQ ID NO: 184049 - DNA, 17 bp, Arabidopsis thaliana
ttcgatgtctagtagtg

SEQ ID NO: 184050 - DNA, 17 bp, Arabidopsis thaliana
ttcgatgtgcgcgactt

SEQ ID NO: 184051 - DNA, 17 bp, Arabidopsis thaliana
ttcgattcccgataact

SEQ ID NO: 184052 - DNA, 17 bp, Arabidopsis thaliana
ttcgattcccggctggt

SEQ ID NO: 184053 - DNA, 17 bp, Arabidopsis thaliana
ttcgattccggagaggg

SEQ ID NO: 184054 - DNA, 17 bp, Arabidopsis thaliana
ttcgattccggcaggtc

SEQ ID NO: 184055 - DNA, 17 bp, Arabidopsis thaliana
ttcgattccggtaggac

SEQ ID NO: 184056 - DNA, 17 bp, Arabidopsis thaliana
ttcgattccggtctagt

SEQ ID NO: 184057 - DNA, 17 bp, Arabidopsis thaliana
ttcgattctcggaacac

SEQ ID NO: 184058 - DNA, 17 bp, Arabidopsis thaliana
ttcgattctcggaacgc

SEQ ID NO: 184059 - DNA, 17 bp, Arabidopsis thaliana
ttcgattctcggaagga

SEQ ID NO: 184060 - DNA, 17 bp, Arabidopsis thaliana
ttcgatttcggattgaa

SEQ ID NO: 184061 - DNA, 17 bp, Arabidopsis thaliana
ttcgcacaattggtcat

SEQ ID NO: 184062 - DNA, 17 bp, Arabidopsis thaliana
ttcgcacaattggttgg

SEQ ID NO: 184063 - DNA, 17 bp, Arabidopsis thaliana
ttcgcacgagagatagc

SEQ ID NO: 184064 - DNA, 17 bp, Arabidopsis thaliana
ttcgcaggagagataag

SEQ ID NO: 184065 - DNA, 17 bp, Arabidopsis thaliana
ttcgcaggagagatacc

SEQ ID NO: 184066 - DNA, 17 bp, Arabidopsis thaliana
ttcgcaggagagataga

SEQ ID NO: 184067 - DNA, 17 bp, Arabidopsis thaliana
ttcgcaggagagatagc

SEQ ID NO: 184068 - DNA, 17 bp, Arabidopsis thaliana
ttcgcaggagagatagt

SEQ ID NO: 184069 - DNA, 17 bp, Arabidopsis thaliana
ttcgcaggagagatatg

SEQ ID NO: 184070 - DNA, 17 bp, Arabidopsis thaliana
ttcgcaggagagatggc

SEQ ID NO: 184071 - DNA, 17 bp, Arabidopsis thaliana
ttcgcaggagagattgc

SEQ ID NO: 184072 - DNA, 17 bp, Arabidopsis thaliana
ttcgcaggagggataga

SEQ ID NO: 184073 - DNA, 17 bp, Arabidopsis thaliana
ttcgcaggagggatagc

SEQ ID NO: 184074 - DNA, 17 bp, Arabidopsis thaliana
ttcgcaggatagataga

SEQ ID NO: 184075 - DNA, 17 bp, Arabidopsis thaliana
ttcgcatctgtagatgg

SEQ ID NO: 184076 - DNA, 17 bp, Arabidopsis thaliana
ttcgccccctacctgac

SEQ ID NO: 184077 - DNA, 17 bp, Arabidopsis thaliana
ttcgcctcacggttggg

SEQ ID NO: 184078 - DNA, 17 bp, Arabidopsis thaliana
ttcgcctgcagagagaa

SEQ ID NO: 184079 - DNA, 17 bp, Arabidopsis thaliana
ttcgcgagtccacaatg

SEQ ID NO: 184080 - DNA, 17 bp, Arabidopsis thaliana
ttcgcgtatcggcatga

SEQ ID NO: 184081 - DNA, 17 bp, Arabidopsis thaliana
ttcgctagatgaacgag

SEQ ID NO: 184082 - DNA, 17 bp, Arabidopsis thaliana
ttcgctcgcagagagaa

SEQ ID NO: 184083 - DNA, 17 bp, Arabidopsis thaliana
ttcgctgcaaactcatg

SEQ ID NO: 184084 - DNA, 17 bp, Arabidopsis thaliana
ttcgctgtctgttcgac

SEQ ID NO: 184085 - DNA, 17 bp, Arabidopsis thaliana
ttcgcttccagagagaa

SEQ ID NO: 184086 - DNA, 17 bp, Arabidopsis thaliana
ttcgcttgaagagagaa

SEQ ID NO: 184087 - DNA, 17 bp, Arabidopsis thaliana
ttcgcttgcaaagagaa

SEQ ID NO: 184088 - DNA, 17 bp, Arabidopsis thaliana
ttcgcttgcagaaagaa

SEQ ID NO: 184089 - DNA, 17 bp, Arabidopsis thaliana
ttcgcttgcagagaaaa

SEQ ID NO: 184090 - DNA, 17 bp, Arabidopsis thaliana
ttcgcttgcagagagaa

SEQ ID NO: 184091 - DNA, 17 bp, Arabidopsis thaliana
ttcgcttgcagagagag

SEQ ID NO: 184092 - DNA, 17 bp, Arabidopsis thaliana
ttcgcttgcagagagga

SEQ ID NO: 184093 - DNA, 17 bp, Arabidopsis thaliana
ttcgcttgcagagataa

SEQ ID NO: 184094 - DNA, 17 bp, Arabidopsis thaliana
ttcgcttgcagagggaa

SEQ ID NO: 184095 - DNA, 17 bp, Arabidopsis thaliana
ttcgcttgcagatagaa

SEQ ID NO: 184096 - DNA, 17 bp, Arabidopsis thaliana
ttcgcttgcagggagaa

SEQ ID NO: 184097 - DNA, 17 bp, Arabidopsis thaliana
ttcgcttgcatagagaa

SEQ ID NO: 184098 - DNA, 17 bp, Arabidopsis thaliana
ttcgcttgccgagagaa

SEQ ID NO: 184099 - DNA, 17 bp, Arabidopsis thaliana
ttcgcttgcggagagaa

SEQ ID NO: 184100 - DNA, 17 bp, Arabidopsis thaliana
ttcgcttgctgagagaa

SEQ ID NO: 184101 - DNA, 17 bp, Arabidopsis thaliana
ttcgcttggtgcaggtc

SEQ ID NO: 184102 - DNA, 17 bp, Arabidopsis thaliana
ttcgcttgtagagagaa

SEQ ID NO: 184103 - DNA, 17 bp, Arabidopsis thaliana
ttcgctttcagagagaa

SEQ ID NO: 184104 - DNA, 17 bp, Arabidopsis thaliana
ttcggaacctgcatggg

SEQ ID NO: 184105 - DNA, 17 bp, Arabidopsis thaliana
ttcggaccagccttcct

SEQ ID NO: 184106 - DNA, 17 bp, Arabidopsis thaliana
ttcggaccaggccttat

SEQ ID NO: 184107 - DNA, 17 bp, Arabidopsis thaliana
ttcggaccaggctccat

SEQ ID NO: 184108 - DNA, 17 bp, Arabidopsis thaliana
ttcggaccaggcttatt

SEQ ID NO: 184109 - DNA, 17 bp, Arabidopsis thaliana
ttcggaccaggcttcat

SEQ ID NO: 184110 - DNA, 17 bp, Arabidopsis thaliana
ttcggaccaggcttccc

SEQ ID NO: 184111 - DNA, 17 bp, Arabidopsis thaliana
ttcggaccaggcttcct

SEQ ID NO: 184112 - DNA, 17 bp, Arabidopsis thaliana
ttcggaccaggcttcgt

SEQ ID NO: 184113 - DNA, 17 bp, Arabidopsis thaliana
ttcggaccaggcttgct

SEQ ID NO: 184114 - DNA, 17 bp, Arabidopsis thaliana
ttcggaccgccttgaat

SEQ ID NO: 184115 - DNA, 17 bp, Arabidopsis thaliana
ttcggaccgccttgact

SEQ ID NO: 184116 - DNA, 17 bp, Arabidopsis thaliana
ttcggaggtttgacaaa

SEQ ID NO: 184117 - DNA, 17 bp, Arabidopsis thaliana
ttcggatcgcggcgacg

SEQ ID NO: 184118 - DNA, 17 bp, Arabidopsis thaliana
ttcggattgcggcgacg

SEQ ID NO: 184119 - DNA, 17 bp, Arabidopsis thaliana
ttcggattgttctctgc

SEQ ID NO: 184120 - DNA, 17 bp, Arabidopsis thaliana
ttcggcgcaagtgaaat

SEQ ID NO: 184121 - DNA, 17 bp, Arabidopsis thaliana
ttcggcggaagcgtcgt

SEQ ID NO: 184122 - DNA, 17 bp, Arabidopsis thaliana
ttcggcgggtcgttttt

SEQ ID NO: 184123 - DNA, 17 bp, Arabidopsis thaliana
ttcggcgtatgagtggt

SEQ ID NO: 184124 - DNA, 17 bp, Arabidopsis thaliana
ttcggcgttcgaaatgt

SEQ ID NO: 184125 - DNA, 17 bp, Arabidopsis thaliana
ttcggctttccgacgga

SEQ ID NO: 184126 - DNA, 17 bp, Arabidopsis thaliana
ttcgggaactcaaccgc

SEQ ID NO: 184127 - DNA, 17 bp, Arabidopsis thaliana
ttcgggaagcatttgca

SEQ ID NO: 184128 - DNA, 17 bp, Arabidopsis thaliana
ttcgggagaaggggtgc

SEQ ID NO: 184129 - DNA, 17 bp, Arabidopsis thaliana
ttcgggatcggagtaat

SEQ ID NO: 184130 - DNA, 17 bp, Arabidopsis thaliana
ttcgggcaaaagatgac

SEQ ID NO: 184131 - DNA, 17 bp, Arabidopsis thaliana
ttcgggcctctctcact

SEQ ID NO: 184132 - DNA, 17 bp, Arabidopsis thaliana
ttcggggcgtggaccga

SEQ ID NO: 184133 - DNA, 17 bp, Arabidopsis thaliana
ttcgggggatacgacac

SEQ ID NO: 184134 - DNA, 17 bp, Arabidopsis thaliana
ttcggggtttatcactt

SEQ ID NO: 184135 - DNA, 17 bp, Arabidopsis thaliana
ttcgggtcataacgaac

SEQ ID NO: 184136 - DNA, 17 bp, Arabidopsis thaliana
ttcgggtcataacggag

SEQ ID NO: 184137 - DNA, 17 bp, Arabidopsis thaliana
ttcgggtcccaccgggt

SEQ ID NO: 184138 - DNA, 17 bp, Arabidopsis thaliana
ttcgggtcccactggat

SEQ ID NO: 184139 - DNA, 17 bp, Arabidopsis thaliana
ttcggtcaagttcctcc

SEQ ID NO: 184140 - DNA, 17 bp, Arabidopsis thaliana
ttcggtccacgctcacc

SEQ ID NO: 184141 - DNA, 17 bp, Arabidopsis thaliana
ttcggtccatatccggt

SEQ ID NO: 184142 - DNA, 17 bp, Arabidopsis thaliana
ttcggtccctgtatagg

SEQ ID NO: 184143 - DNA, 17 bp, Arabidopsis thaliana
ttcggtcctgcgtgagg

SEQ ID NO: 184144 - DNA, 17 bp, Arabidopsis thaliana
ttcggtcctgggcagca

SEQ ID NO: 184145 - DNA, 17 bp, Arabidopsis thaliana
ttcggtcggcgatacgc

SEQ ID NO: 184146 - DNA, 17 bp, Arabidopsis thaliana
ttcggtcggtttagaaa

SEQ ID NO: 184147 - DNA, 17 bp, Arabidopsis thaliana
ttcggtgtctgttcgac

SEQ ID NO: 184148 - DNA, 17 bp, Arabidopsis thaliana
ttcggttccggcaggtc

SEQ ID NO: 184149 - DNA, 17 bp, Arabidopsis thaliana
ttcggttcctcggatcg

SEQ ID NO: 184150 - DNA, 17 bp, Arabidopsis thaliana
ttcggttctctggattc

SEQ ID NO: 184151 - DNA, 17 bp, Arabidopsis thaliana
ttcggttgtatgcgatg

SEQ ID NO: 184152 - DNA, 17 bp, Arabidopsis thaliana
ttcgtaacctgcatggg

SEQ ID NO: 184153 - DNA, 17 bp, Arabidopsis thaliana
ttcgtacacttggattg

SEQ ID NO: 184154 - DNA, 17 bp, Arabidopsis thaliana
ttcgtaccaaacgatca

SEQ ID NO: 184155 - DNA, 17 bp, Arabidopsis thaliana
ttcgtagtctgttcgac

SEQ ID NO: 184156 - DNA, 17 bp, Arabidopsis thaliana
ttcgtcatgagcctctg

SEQ ID NO: 184157 - DNA, 17 bp, Arabidopsis thaliana
ttcgtcgatatgttgaa

SEQ ID NO: 184158 - DNA, 17 bp, Arabidopsis thaliana
ttcgtcgcggagagaag

SEQ ID NO: 184159 - DNA, 17 bp, Arabidopsis thaliana
ttcgtcggagggctgtc

SEQ ID NO: 184160 - DNA, 17 bp, Arabidopsis thaliana
ttcgtcgtctgttcgac

SEQ ID NO: 184161 - DNA, 17 bp, Arabidopsis thaliana
ttcgtgattgaaagaag

SEQ ID NO: 184162 - DNA, 17 bp, Arabidopsis thaliana
ttcgtggtctgttcgac

SEQ ID NO: 184163 - DNA, 17 bp, Arabidopsis thaliana
ttcgtgtcccaccgggt

SEQ ID NO: 184164 - DNA, 17 bp, Arabidopsis thaliana
ttcgtgtcccactgggt

SEQ ID NO: 184165 - DNA, 17 bp, Arabidopsis thaliana
ttcgtgtctgttcgacc

SEQ ID NO: 184166 - DNA, 17 bp, Arabidopsis thaliana
ttcgttatctgttcgac

SEQ ID NO: 184167 - DNA, 17 bp, Arabidopsis thaliana
ttcgttccacgctcacc

SEQ ID NO: 184168 - DNA, 17 bp, Arabidopsis thaliana
ttcgttccccagtggag

SEQ ID NO: 184169 - DNA, 17 bp, Arabidopsis thaliana
ttcgttccccggcaacg

SEQ ID NO: 184170 - DNA, 17 bp, Arabidopsis thaliana
ttcgttccctgtatagg

SEQ ID NO: 184171 - DNA, 17 bp, Arabidopsis thaliana
ttcgttcctgcgtgtgg

SEQ ID NO: 184172 - DNA, 17 bp, Arabidopsis thaliana
ttcgttcctgggcagaa

SEQ ID NO: 184173 - DNA, 17 bp, Arabidopsis thaliana
ttcgttcctgggcagca

SEQ ID NO: 184174 - DNA, 17 bp, Arabidopsis thaliana
ttcgttcgttccccccc

SEQ ID NO: 184175 - DNA, 17 bp, Arabidopsis thaliana
ttcgttctctgttcgac

SEQ ID NO: 184176 - DNA, 17 bp, Arabidopsis thaliana
ttcgttgcctgttcgac

SEQ ID NO: 184177 - DNA, 17 bp, Arabidopsis thaliana
ttcgttgtcagttcgac

SEQ ID NO: 184178 - DNA, 17 bp, Arabidopsis thaliana
ttcgttgtcagttcgtt

SEQ ID NO: 184179 - DNA, 17 bp, Arabidopsis thaliana
ttcgttgtccgttcgac

SEQ ID NO: 184180 - DNA, 17 bp, Arabidopsis thaliana
ttcgttgtcggttcgac

SEQ ID NO: 184181 - DNA, 17 bp, Arabidopsis thaliana
ttcgttgtcggttcgtt

SEQ ID NO: 184182 - DNA, 17 bp, Arabidopsis thaliana
ttcgttgtctattcgac

SEQ ID NO: 184183 - DNA, 17 bp, Arabidopsis thaliana
ttcgttgtctcttcgac

SEQ ID NO: 184184 - DNA, 17 bp, Arabidopsis thaliana
ttcgttgtctgtccgac

SEQ ID NO: 184185 - DNA, 17 bp, Arabidopsis thaliana
ttcgttgtctgttcaac

SEQ ID NO: 184186 - DNA, 17 bp, Arabidopsis thaliana
ttcgttgtctgttcgac

SEQ ID NO: 184187 - DNA, 17 bp, Arabidopsis thaliana
ttcgttgtctgttcgat

SEQ ID NO: 184188 - DNA, 17 bp, Arabidopsis thaliana
ttcgttgtctgttcgtc

SEQ ID NO: 184189 - DNA, 17 bp, Arabidopsis thaliana
ttcgttgtctgttcgtt

SEQ ID NO: 184190 - DNA, 17 bp, Arabidopsis thaliana
ttcgttgtctgttctac

SEQ ID NO: 184191 - DNA, 17 bp, Arabidopsis thaliana
ttcgttgtctgtttgac

SEQ ID NO: 184192 - DNA, 17 bp, Arabidopsis thaliana
ttcgttgtctttcgacc

SEQ ID NO: 184193 - DNA, 17 bp, Arabidopsis thaliana
ttcgttgtcttttcgac

SEQ ID NO: 184194 - DNA, 17 bp, Arabidopsis thaliana
ttcgttgttcgttcgac

SEQ ID NO: 184195 - DNA, 17 bp, Arabidopsis thaliana
ttcgttgttcgttcgtt

SEQ ID NO: 184196 - DNA, 17 bp, Arabidopsis thaliana
ttcgttgtttcgacctt

SEQ ID NO: 184197 - DNA, 17 bp, Arabidopsis thaliana
ttcgttgtttgttcgac

SEQ ID NO: 184198 - DNA, 17 bp, Arabidopsis thaliana
ttcgtttaatgcgtcgg

SEQ ID NO: 184199 - DNA, 17 bp, Arabidopsis thaliana
ttcgtttcacgtcgggt

SEQ ID NO: 184200 - DNA, 17 bp, Arabidopsis thaliana
ttcgtttccattgtgga

SEQ ID NO: 184201 - DNA, 17 bp, Arabidopsis thaliana
ttcgtttcccggctggt

SEQ ID NO: 184202 - DNA, 17 bp, Arabidopsis thaliana
ttcgtttccctggatgc

SEQ ID NO: 184203 - DNA, 17 bp, Arabidopsis thaliana
ttcgtttccgacaggtc

SEQ ID NO: 184204 - DNA, 17 bp, Arabidopsis thaliana
ttcgtttccggcaggtc

SEQ ID NO: 184205 - DNA, 17 bp, Arabidopsis thaliana
ttcgtttcgttcttggg

SEQ ID NO: 184206 - DNA, 17 bp, Arabidopsis thaliana
ttcgtttgcagagagaa

SEQ ID NO: 184207 - DNA, 17 bp, Arabidopsis thaliana
ttctaaaccgaccgacc

SEQ ID NO: 184208 - DNA, 17 bp, Arabidopsis thaliana
ttctaaaccgaccgagc

SEQ ID NO: 184209 - DNA, 17 bp, Arabidopsis thaliana
ttctaaatccaacataa

SEQ ID NO: 184210 - DNA, 17 bp, Arabidopsis thaliana
ttctaactaagtccgtc

SEQ ID NO: 184211 - DNA, 17 bp, Arabidopsis thaliana
ttctaagcccaacataa

SEQ ID NO: 184212 - DNA, 17 bp, Arabidopsis thaliana
ttctaagcccaacatag

SEQ ID NO: 184213 - DNA, 17 bp, Arabidopsis thaliana
ttctaagctcaacatat

SEQ ID NO: 184214 - DNA, 17 bp, Arabidopsis thaliana
ttctaagcttcttcctt

SEQ ID NO: 184215 - DNA, 17 bp, Arabidopsis thaliana
ttctaagtccaacaaac

SEQ ID NO: 184216 - DNA, 17 bp, Arabidopsis thaliana
ttctaagtccaacataa

SEQ ID NO: 184217 - DNA, 17 bp, Arabidopsis thaliana
ttctaagtccaacatac

SEQ ID NO: 184218 - DNA, 17 bp, Arabidopsis thaliana
ttctaagtccaacatag

SEQ ID NO: 184219 - DNA, 17 bp, Arabidopsis thaliana
ttctaagtccaacatat

SEQ ID NO: 184220 - DNA, 17 bp, Arabidopsis thaliana
ttctaagtccaacatca

SEQ ID NO: 184221 - DNA, 17 bp, Arabidopsis thaliana
ttctaagtccaacatcg

SEQ ID NO: 184222 - DNA, 17 bp, Arabidopsis thaliana
ttctaagtccaacattg

SEQ ID NO: 184223 - DNA, 17 bp, Arabidopsis thaliana
ttctaagtccaacttag

SEQ ID NO: 184224 - DNA, 17 bp, Arabidopsis thaliana
ttctaagtccaatatag

SEQ ID NO: 184225 - DNA, 17 bp, Arabidopsis thaliana
ttctaagtctaacatag

SEQ ID NO: 184226 - DNA, 17 bp, Arabidopsis thaliana
ttctaagttcaacaaac

SEQ ID NO: 184227 - DNA, 17 bp, Arabidopsis thaliana
ttctaagttcaacaata

SEQ ID NO: 184228 - DNA, 17 bp, Arabidopsis thaliana
ttctaagttcaacaatc

SEQ ID NO: 184229 - DNA, 17 bp, Arabidopsis thaliana
ttctaagttcaacacat

SEQ ID NO: 184230 - DNA, 17 bp, Arabidopsis thaliana
ttctaagttcaacataa

SEQ ID NO: 184231 - DNA, 17 bp, Arabidopsis thaliana
ttctaagttcaacatag

SEQ ID NO: 184232 - DNA, 17 bp, Arabidopsis thaliana
ttctaagttcaacatat

SEQ ID NO: 184233 - DNA, 17 bp, Arabidopsis thaliana
ttctaagttcgacatat

SEQ ID NO: 184234 - DNA, 17 bp, Arabidopsis thaliana
ttctaagtttaacataa

SEQ ID NO: 184235 - DNA, 17 bp, Arabidopsis thaliana
ttctaagtttaacatag

SEQ ID NO: 184236 - DNA, 17 bp, Arabidopsis thaliana
ttctaattccaacatag

SEQ ID NO: 184237 - DNA, 17 bp, Arabidopsis thaliana
ttctacagctttcttga

SEQ ID NO: 184238 - DNA, 17 bp, Arabidopsis thaliana
ttctacattgtcaatgg

SEQ ID NO: 184239 - DNA, 17 bp, Arabidopsis thaliana
ttctaccatccgatcaa

SEQ ID NO: 184240 - DNA, 17 bp, Arabidopsis thaliana
ttctacccgccgctcgg

SEQ ID NO: 184241 - DNA, 17 bp, Arabidopsis thaliana
ttctaccgcaagagtta

SEQ ID NO: 184242 - DNA, 17 bp, Arabidopsis thaliana
ttctaccgcaagagttg

SEQ ID NO: 184243 - DNA, 17 bp, Arabidopsis thaliana
ttctactatcctgggcc

SEQ ID NO: 184244 - DNA, 17 bp, Arabidopsis thaliana
ttctacttaatgaacaa

SEQ ID NO: 184245 - DNA, 17 bp, Arabidopsis thaliana
ttctatcgggtaaagcc

SEQ ID NO: 184246 - DNA, 17 bp, Arabidopsis thaliana
ttctatgagtttgtaaa

SEQ ID NO: 184247 - DNA, 17 bp, Arabidopsis thaliana
ttctatgcggcgcacaa

SEQ ID NO: 184248 - DNA, 17 bp, Arabidopsis thaliana
ttctatgcggcgcacgc

SEQ ID NO: 184249 - DNA, 17 bp, Arabidopsis thaliana
ttctcaattctgtcgag

SEQ ID NO: 184250 - DNA, 17 bp, Arabidopsis thaliana
ttctcacaaatggtcta

SEQ ID NO: 184251 - DNA, 17 bp, Arabidopsis thaliana
ttctcacctgcgcaaat

SEQ ID NO: 184252 - DNA, 17 bp, Arabidopsis thaliana
ttctcagttaattcacg

SEQ ID NO: 184253 - DNA, 17 bp, Arabidopsis thaliana
ttctcagttgcatcaac

SEQ ID NO: 184254 - DNA, 17 bp, Arabidopsis thaliana
ttctcatatttcaattg

SEQ ID NO: 184255 - DNA, 17 bp, Arabidopsis thaliana
ttctccaatgtatgcct

SEQ ID NO: 184256 - DNA, 17 bp, Arabidopsis thaliana
ttctccatcccatttac

SEQ ID NO: 184257 - DNA, 17 bp, Arabidopsis thaliana
ttctccatcttgttgag

SEQ ID NO: 184258 - DNA, 17 bp, Arabidopsis thaliana
ttctcccccgtgttttg

SEQ ID NO: 184259 - DNA, 17 bp, Arabidopsis thaliana
ttctcctaccttgtcta

SEQ ID NO: 184260 - DNA, 17 bp, Arabidopsis thaliana
ttctcctgggcagcacc

SEQ ID NO: 184261 - DNA, 17 bp, Arabidopsis thaliana
ttctcgaacaaagtcat

SEQ ID NO: 184262 - DNA, 17 bp, Arabidopsis thaliana
ttctcgaccttgtaaga

SEQ ID NO: 184263 - DNA, 17 bp, Arabidopsis thaliana
ttctcgagcacgcacga

SEQ ID NO: 184264 - DNA, 17 bp, Arabidopsis thaliana
ttctcgcgacgtcgcgg

SEQ ID NO: 184265 - DNA, 17 bp, Arabidopsis thaliana
ttctcggccttttggct

SEQ ID NO: 184266 - DNA, 17 bp, Arabidopsis thaliana
ttctcggtaaaatcgga

SEQ ID NO: 184267 - DNA, 17 bp, Arabidopsis thaliana
ttctcggttcgcgatcc

SEQ ID NO: 184268 - DNA, 17 bp, Arabidopsis thaliana
ttctcggttgatgtatg

SEQ ID NO: 184269 - DNA, 17 bp, Arabidopsis thaliana
ttctcggttgatgttta

SEQ ID NO: 184270 - DNA, 17 bp, Arabidopsis thaliana
ttctcgttttacagatt

SEQ ID NO: 184271 - DNA, 17 bp, Arabidopsis thaliana
ttctctacaaacttttc

SEQ ID NO: 184272 - DNA, 17 bp, Arabidopsis thaliana
ttctctacatgtgctta

SEQ ID NO: 184273 - DNA, 17 bp, Arabidopsis thaliana
ttctctacgctatgttg

SEQ ID NO: 184274 - DNA, 17 bp, Arabidopsis thaliana
ttctctacttgtttcgt

SEQ ID NO: 184275 - DNA, 17 bp, Arabidopsis thaliana
ttctctcaactgatcca

SEQ ID NO: 184276 - DNA, 17 bp, Arabidopsis thaliana
ttctctcatgtttctct

SEQ ID NO: 184277 - DNA, 17 bp, Arabidopsis thaliana
ttctctccgaggtgtag

SEQ ID NO: 184278 - DNA, 17 bp, Arabidopsis thaliana
ttctctcgtcaatggac

SEQ ID NO: 184279 - DNA, 17 bp, Arabidopsis thaliana
ttctctctttccattgc

SEQ ID NO: 184280 - DNA, 17 bp, Arabidopsis thaliana
ttctctgtgtaagcgaa

SEQ ID NO: 184281 - DNA, 17 bp, Arabidopsis thaliana
ttctcttctacctggat

SEQ ID NO: 184282 - DNA, 17 bp, Arabidopsis thaliana
ttctgaatctgaatctg

SEQ ID NO: 184283 - DNA, 17 bp, Arabidopsis thaliana
ttctgactttctgatca

SEQ ID NO: 184284 - DNA, 17 bp, Arabidopsis thaliana
ttctgattcattttcca

SEQ ID NO: 184285 - DNA, 17 bp, Arabidopsis thaliana
ttctgcaaacctaattt

SEQ ID NO: 184286 - DNA, 17 bp, Arabidopsis thaliana
ttctgcaccagtatagc

SEQ ID NO: 184287 - DNA, 17 bp, Arabidopsis thaliana
ttctgcaggatatccaa

SEQ ID NO: 184288 - DNA, 17 bp, Arabidopsis thaliana
ttctgcaggatatccat

SEQ ID NO: 184289 - DNA, 17 bp, Arabidopsis thaliana
ttctgccatcacgacag

SEQ ID NO: 184290 - DNA, 17 bp, Arabidopsis thaliana
ttctgcctattaactct

SEQ ID NO: 184291 - DNA, 17 bp, Arabidopsis thaliana
ttctgctatgttgctgc

SEQ ID NO: 184292 - DNA, 17 bp, Arabidopsis thaliana
ttctgctgctgttgcaa

SEQ ID NO: 184293 - DNA, 17 bp, Arabidopsis thaliana
ttctggagcaggaagtg

SEQ ID NO: 184294 - DNA, 17 bp, Arabidopsis thaliana
ttctggccgagggcacg

SEQ ID NO: 184295 - DNA, 17 bp, Arabidopsis thaliana
ttctggctaaccttgag

SEQ ID NO: 184296 - DNA, 17 bp, Arabidopsis thaliana
ttctggtacatctttat

SEQ ID NO: 184297 - DNA, 17 bp, Arabidopsis thaliana
ttctggtttttgctgca

SEQ ID NO: 184298 - DNA, 17 bp, Arabidopsis thaliana
ttctgtaacgcccgtta

SEQ ID NO: 184299 - DNA, 17 bp, Arabidopsis thaliana
ttctgtaatcttgaggt

SEQ ID NO: 184300 - DNA, 17 bp, Arabidopsis thaliana
ttctgtagacccatcat

SEQ ID NO: 184301 - DNA, 17 bp, Arabidopsis thaliana
ttctgtcctgggatggt

SEQ ID NO: 184302 - DNA, 17 bp, Arabidopsis thaliana
ttctgtcgagtttctac

SEQ ID NO: 184303 - DNA, 17 bp, Arabidopsis thaliana
ttctgtctgcggttcga

SEQ ID NO: 184304 - DNA, 17 bp, Arabidopsis thaliana
ttctgtgactttggttt

SEQ ID NO: 184305 - DNA, 17 bp, Arabidopsis thaliana
ttctgttagatggactt

SEQ ID NO: 184306 - DNA, 17 bp, Arabidopsis thaliana
ttcttaagtattgtgct

SEQ ID NO: 184307 - DNA, 17 bp, Arabidopsis thaliana
ttcttaggctccatgct

SEQ ID NO: 184308 - DNA, 17 bp, Arabidopsis thaliana
ttcttagtcgcatcctg

SEQ ID NO: 184309 - DNA, 17 bp, Arabidopsis thaliana
ttcttattttgcaaggc

SEQ ID NO: 184310 - DNA, 17 bp, Arabidopsis thaliana
ttcttcaggaacaagca

SEQ ID NO: 184311 - DNA, 17 bp, Arabidopsis thaliana
ttcttcatcgcatcctt

SEQ ID NO: 184312 - DNA, 17 bp, Arabidopsis thaliana
ttcttccagtttagcta

SEQ ID NO: 184313 - DNA, 17 bp, Arabidopsis thaliana
ttcttccatctttctga

SEQ ID NO: 184314 - DNA, 17 bp, Arabidopsis thaliana
ttcttcccaaatcttag

SEQ ID NO: 184315 - DNA, 17 bp, Arabidopsis thaliana
ttcttccccaacggcaa

SEQ ID NO: 184316 - DNA, 17 bp, Arabidopsis thaliana
ttcttcccccgcatctc

SEQ ID NO: 184317 - DNA, 17 bp, Arabidopsis thaliana
ttcttccgtttctttcc

SEQ ID NO: 184318 - DNA, 17 bp, Arabidopsis thaliana
ttcttcctccaggattc

SEQ ID NO: 184319 - DNA, 17 bp, Arabidopsis thaliana
ttcttcctcgtttccgt

SEQ ID NO: 184320 - DNA, 17 bp, Arabidopsis thaliana
ttcttcctgaaaggcct

SEQ ID NO: 184321 - DNA, 17 bp, Arabidopsis thaliana
ttcttcgaatttgtcgg

SEQ ID NO: 184322 - DNA, 17 bp, Arabidopsis thaliana
ttcttcgtgaatatcta

SEQ ID NO: 184323 - DNA, 17 bp, Arabidopsis thaliana
ttcttcgtgaatatctg

SEQ ID NO: 184324 - DNA, 17 bp, Arabidopsis thaliana
ttcttctaccatcctat

SEQ ID NO: 184325 - DNA, 17 bp, Arabidopsis thaliana
ttcttctccttcacaaa

SEQ ID NO: 184326 - DNA, 17 bp, Arabidopsis thaliana
ttcttctgaatatctgg

SEQ ID NO: 184327 - DNA, 17 bp, Arabidopsis thaliana
ttcttctgcgggcgggc

SEQ ID NO: 184328 - DNA, 17 bp, Arabidopsis thaliana
ttcttctgtaatcttga

SEQ ID NO: 184329 - DNA, 17 bp, Arabidopsis thaliana
ttcttcttagccgagta

SEQ ID NO: 184330 - DNA, 17 bp, Arabidopsis thaliana
ttcttgaccagatacca

SEQ ID NO: 184331 - DNA, 17 bp, Arabidopsis thaliana
ttcttgaccttacaagg

SEQ ID NO: 184332 - DNA, 17 bp, Arabidopsis thaliana
ttcttgaccttgcaagg

SEQ ID NO: 184333 - DNA, 17 bp, Arabidopsis thaliana
ttcttgaccttgtaact

SEQ ID NO: 184334 - DNA, 17 bp, Arabidopsis thaliana
ttcttgaccttgtaaga

SEQ ID NO: 184335 - DNA, 17 bp, Arabidopsis thaliana
ttcttgaccttgtaagg

SEQ ID NO: 184336 - DNA, 17 bp, Arabidopsis thaliana
ttcttgaccttgtatgt

SEQ ID NO: 184337 - DNA, 17 bp, Arabidopsis thaliana
ttcttgcaaggttcaag

SEQ ID NO: 184338 - DNA, 17 bp, Arabidopsis thaliana
ttcttgcagcgttggtt

SEQ ID NO: 184339 - DNA, 17 bp, Arabidopsis thaliana
ttcttgcagcgttgttt

SEQ ID NO: 184340 - DNA, 17 bp, Arabidopsis thaliana
ttcttgcccatcatcgg

SEQ ID NO: 184341 - DNA, 17 bp, Arabidopsis thaliana
ttcttgcggcggttgcg

SEQ ID NO: 184342 - DNA, 17 bp, Arabidopsis thaliana
ttcttgctcttccaaga

SEQ ID NO: 184343 - DNA, 17 bp, Arabidopsis thaliana
ttcttggataaagacat

SEQ ID NO: 184344 - DNA, 17 bp, Arabidopsis thaliana
ttctttaaaattgtttc

SEQ ID NO: 184345 - DNA, 17 bp, Arabidopsis thaliana
ttctttaccgcaacaaa

SEQ ID NO: 184346 - DNA, 17 bp, Arabidopsis thaliana
ttctttagacgacttga

SEQ ID NO: 184347 - DNA, 17 bp, Arabidopsis thaliana
ttctttctatttagcta

SEQ ID NO: 184348 - DNA, 17 bp, Arabidopsis thaliana
ttctttgcaataacgct

SEQ ID NO: 184349 - DNA, 17 bp, Arabidopsis thaliana
ttctttgctaaacggaa

SEQ ID NO: 184350 - DNA, 17 bp, Arabidopsis thaliana
ttctttggacgacttga

SEQ ID NO: 184351 - DNA, 17 bp, Arabidopsis thaliana
ttctttgtcgctaagat

SEQ ID NO: 184352 - DNA, 17 bp, Arabidopsis thaliana
ttctttgtctgttcgac

SEQ ID NO: 184353 - DNA, 17 bp, Arabidopsis thaliana
ttcttttgccgatgctc

SEQ ID NO: 184354 - DNA, 17 bp, Arabidopsis thaliana
ttcttttggcttgagtt

SEQ ID NO: 184355 - DNA, 17 bp, Arabidopsis thaliana
ttcttttgtctgttcga

SEQ ID NO: 184356 - DNA, 17 bp, Arabidopsis thaliana
ttctttttcgtttccat

SEQ ID NO: 184357 - DNA, 17 bp, Arabidopsis thaliana
ttgaaaactagctagat

SEQ ID NO: 184358 - DNA, 17 bp, Arabidopsis thaliana
ttgaaaacttacctaaa

SEQ ID NO: 184359 - DNA, 17 bp, Arabidopsis thaliana
ttgaaaagccagtggcg

SEQ ID NO: 184360 - DNA, 17 bp, Arabidopsis thaliana
ttgaaaagccagtggtt

SEQ ID NO: 184361 - DNA, 17 bp, Arabidopsis thaliana
ttgaaaaggacttggaa

SEQ ID NO: 184362 - DNA, 17 bp, Arabidopsis thaliana
ttgaaaagtatccaacc

SEQ ID NO: 184363 - DNA, 17 bp, Arabidopsis thaliana
ttgaaaatccggaggaa

SEQ ID NO: 184364 - DNA, 17 bp, Arabidopsis thaliana
ttgaaaatccggaggac

SEQ ID NO: 184365 - DNA, 17 bp, Arabidopsis thaliana
ttgaaaatctcatttac

SEQ ID NO: 184366 - DNA, 17 bp, Arabidopsis thaliana
ttgaaaatgactacatc

SEQ ID NO: 184367 - DNA, 17 bp, Arabidopsis thaliana
ttgaaacacggaccaaa

SEQ ID NO: 184368 - DNA, 17 bp, Arabidopsis thaliana
ttgaaagccagtctcaa

SEQ ID NO: 184369 - DNA, 17 bp, Arabidopsis thaliana
ttgaaagcgactacatc

SEQ ID NO: 184370 - DNA, 17 bp, Arabidopsis thaliana
ttgaaagtgacaacatc

SEQ ID NO: 184371 - DNA, 17 bp, Arabidopsis thaliana
ttgaaagtgacgacatc

SEQ ID NO: 184372 - DNA, 17 bp, Arabidopsis thaliana
ttgaaagtgactacatc

SEQ ID NO: 184373 - DNA, 17 bp, Arabidopsis thaliana
ttgaaagtgactacatt

SEQ ID NO: 184374 - DNA, 17 bp, Arabidopsis thaliana
ttgaaagtgactatatc

SEQ ID NO: 184375 - DNA, 17 bp, Arabidopsis thaliana
ttgaaagtgagtacatc

SEQ ID NO: 184376 - DNA, 17 bp, Arabidopsis thaliana
ttgaaagtgattacatc

SEQ ID NO: 184377 - DNA, 17 bp, Arabidopsis thaliana
ttgaaagtggctacatc

SEQ ID NO: 184378 - DNA, 17 bp, Arabidopsis thaliana
ttgaaatttcatcgtga

SEQ ID NO: 184379 - DNA, 17 bp, Arabidopsis thaliana
ttgaacaggacttggaa

SEQ ID NO: 184380 - DNA, 17 bp, Arabidopsis thaliana
ttgaaccttgggcctgg

SEQ ID NO: 184381 - DNA, 17 bp, Arabidopsis thaliana
ttgaacgcaagttgcgc

SEQ ID NO: 184382 - DNA, 17 bp, Arabidopsis thaliana
ttgaacggcaaaggtcg

SEQ ID NO: 184383 - DNA, 17 bp, Arabidopsis thaliana
ttgaacgtgactaagta

SEQ ID NO: 184384 - DNA, 17 bp, Arabidopsis thaliana
ttgaactagaccgagta

SEQ ID NO: 184385 - DNA, 17 bp, Arabidopsis thaliana
ttgaagaagacttggaa

SEQ ID NO: 184386 - DNA, 17 bp, Arabidopsis thaliana
ttgaagacagtaaagta

SEQ ID NO: 184387 - DNA, 17 bp, Arabidopsis thaliana
ttgaagacgacttggaa

SEQ ID NO: 184388 - DNA, 17 bp, Arabidopsis thaliana
ttgaagagaacttggaa

SEQ ID NO: 184389 - DNA, 17 bp, Arabidopsis thaliana
ttgaagagacttggaaa

SEQ ID NO: 184390 - DNA, 17 bp, Arabidopsis thaliana
ttgaagagacttggaac

SEQ ID NO: 184391 - DNA, 17 bp, Arabidopsis thaliana
ttgaagaggacatggaa

SEQ ID NO: 184392 - DNA, 17 bp, Arabidopsis thaliana
ttgaagaggacctggaa

SEQ ID NO: 184393 - DNA, 17 bp, Arabidopsis thaliana
ttgaagaggacgtggaa

SEQ ID NO: 184394 - DNA, 17 bp, Arabidopsis thaliana
ttgaagaggactaggaa

SEQ ID NO: 184395 - DNA, 17 bp, Arabidopsis thaliana
ttgaagaggactcggaa

SEQ ID NO: 184396 - DNA, 17 bp, Arabidopsis thaliana
ttgaagaggactggaac

SEQ ID NO: 184397 - DNA, 17 bp, Arabidopsis thaliana
ttgaagaggactgggaa

SEQ ID NO: 184398 - DNA, 17 bp, Arabidopsis thaliana
ttgaagaggacttagaa

SEQ ID NO: 184399 - DNA, 17 bp, Arabidopsis thaliana
ttgaagaggacttcgaa

SEQ ID NO: 184400 - DNA, 17 bp, Arabidopsis thaliana
ttgaagaggacttgaaa

SEQ ID NO: 184401 - DNA, 17 bp, Arabidopsis thaliana
ttgaagaggacttgaac

SEQ ID NO: 184402 - DNA, 17 bp, Arabidopsis thaliana
ttgaagaggacttgata

SEQ ID NO: 184403 - DNA, 17 bp, Arabidopsis thaliana
ttgaagaggacttgcaa

SEQ ID NO: 184404 - DNA, 17 bp, Arabidopsis thaliana
ttgaagaggacttgctt

SEQ ID NO: 184405 - DNA, 17 bp, Arabidopsis thaliana
ttgaagaggacttggaa

SEQ ID NO: 184406 - DNA, 17 bp, Arabidopsis thaliana
ttgaagaggacttggac

SEQ ID NO: 184407 - DNA, 17 bp, Arabidopsis thaliana
ttgaagaggacttggag

SEQ ID NO: 184408 - DNA, 17 bp, Arabidopsis thaliana
ttgaagaggacttggat

SEQ ID NO: 184409 - DNA, 17 bp, Arabidopsis thaliana
ttgaagaggacttggga

SEQ ID NO: 184410 - DNA, 17 bp, Arabidopsis thaliana
ttgaagaggacttggta

SEQ ID NO: 184411 - DNA, 17 bp, Arabidopsis thaliana
ttgaagaggacttgtaa

SEQ ID NO: 184412 - DNA, 17 bp, Arabidopsis thaliana
ttgaagaggactttgaa

SEQ ID NO: 184413 - DNA, 17 bp, Arabidopsis thaliana
ttgaagaggagggaact

SEQ ID NO: 184414 - DNA, 17 bp, Arabidopsis thaliana
ttgaagaggatttggaa

SEQ ID NO: 184415 - DNA, 17 bp, Arabidopsis thaliana
ttgaagagggcttggaa

SEQ ID NO: 184416 - DNA, 17 bp, Arabidopsis thaliana
ttgaagaggtcttggaa

SEQ ID NO: 184417 - DNA, 17 bp, Arabidopsis thaliana
ttgaagagtacttggaa

SEQ ID NO: 184418 - DNA, 17 bp, Arabidopsis thaliana
ttgaagatgacgtggaa

SEQ ID NO: 184419 - DNA, 17 bp, Arabidopsis thaliana
ttgaagatgacttggaa

SEQ ID NO: 184420 - DNA, 17 bp, Arabidopsis thaliana
ttgaagattcgacaaag

SEQ ID NO: 184421 - DNA, 17 bp, Arabidopsis thaliana
ttgaagccgctggcagg

SEQ ID NO: 184422 - DNA, 17 bp, Arabidopsis thaliana
ttgaagggacttggaac

SEQ ID NO: 184423 - DNA, 17 bp, Arabidopsis thaliana
ttgaaggggacttggaa

SEQ ID NO: 184424 - DNA, 17 bp, Arabidopsis thaliana
ttgaaggtcgcgattca

SEQ ID NO: 184425 - DNA, 17 bp, Arabidopsis thaliana
ttgaaggtcgcgattct

SEQ ID NO: 184426 - DNA, 17 bp, Arabidopsis thaliana
ttgaagtacagaacgca

SEQ ID NO: 184427 - DNA, 17 bp, Arabidopsis thaliana
ttgaagtacagaacgct

SEQ ID NO: 184428 - DNA, 17 bp, Arabidopsis thaliana
ttgaagtggacttggaa

SEQ ID NO: 184429 - DNA, 17 bp, Arabidopsis thaliana
ttgaagtggatgagagg

SEQ ID NO: 184430 - DNA, 17 bp, Arabidopsis thaliana
ttgaatccatcaatttc

SEQ ID NO: 184431 - DNA, 17 bp, Arabidopsis thaliana
ttgaatggtaatgattt

SEQ ID NO: 184432 - DNA, 17 bp, Arabidopsis thaliana
ttgaattcctctgtgct

SEQ ID NO: 184433 - DNA, 17 bp, Arabidopsis thaliana
ttgaattgtgaagatcc

SEQ ID NO: 184434 - DNA, 17 bp, Arabidopsis thaliana
ttgacaattcagtaggg

SEQ ID NO: 184435 - DNA, 17 bp, Arabidopsis thaliana
ttgacacggctcaatca

SEQ ID NO: 184436 - DNA, 17 bp, Arabidopsis thaliana
ttgacacttttcgtgcc

SEQ ID NO: 184437 - DNA, 17 bp, Arabidopsis thaliana
ttgacagaacgttccgc

SEQ ID NO: 184438 - DNA, 17 bp, Arabidopsis thaliana
ttgacagaagaaagaaa

SEQ ID NO: 184439 - DNA, 17 bp, Arabidopsis thaliana
ttgacagaagaaagaga

SEQ ID NO: 184440 - DNA, 17 bp, Arabidopsis thaliana
ttgacagaagaaagatt

SEQ ID NO: 184441 - DNA, 17 bp, Arabidopsis thaliana
ttgacagaagagagtaa

SEQ ID NO: 184442 - DNA, 17 bp, Arabidopsis thaliana
ttgacagaagagagtga

SEQ ID NO: 184443 - DNA, 17 bp, Arabidopsis thaliana
ttgacagaagatagaga

SEQ ID NO: 184444 - DNA, 17 bp, Arabidopsis thaliana
ttgacagacagaaggaa

SEQ ID NO: 184445 - DNA, 17 bp, Arabidopsis thaliana
ttgacagactgagagct

SEQ ID NO: 184446 - DNA, 17 bp, Arabidopsis thaliana
ttgacagattgagagct

SEQ ID NO: 184447 - DNA, 17 bp, Arabidopsis thaliana
ttgacagcaagatgcaa

SEQ ID NO: 184448 - DNA, 17 bp, Arabidopsis thaliana
ttgacagcaggacggtg

SEQ ID NO: 184449 - DNA, 17 bp, Arabidopsis thaliana
ttgacaggaattcggcc

SEQ ID NO: 184450 - DNA, 17 bp, Arabidopsis thaliana
ttgacaggagagagtga

SEQ ID NO: 184451 - DNA, 17 bp, Arabidopsis thaliana
ttgaccaaaaagtccaa

SEQ ID NO: 184452 - DNA, 17 bp, Arabidopsis thaliana
ttgaccaaacggagtta

SEQ ID NO: 184453 - DNA, 17 bp, Arabidopsis thaliana
ttgacccgttcggcacc

SEQ ID NO: 184454 - DNA, 17 bp, Arabidopsis thaliana
ttgacctcatttggttt

SEQ ID NO: 184455 - DNA, 17 bp, Arabidopsis thaliana
ttgaccttagctcagtt

SEQ ID NO: 184456 - DNA, 17 bp, Arabidopsis thaliana
ttgaccttgtaaggcct

SEQ ID NO: 184457 - DNA, 17 bp, Arabidopsis thaliana
ttgacgaaaacatagtc

SEQ ID NO: 184458 - DNA, 17 bp, Arabidopsis thaliana
ttgacgacgctctacaa

SEQ ID NO: 184459 - DNA, 17 bp, Arabidopsis thaliana
ttgacgagagaacttaa

SEQ ID NO: 184460 - DNA, 17 bp, Arabidopsis thaliana
ttgacgagagaacttat

SEQ ID NO: 184461 - DNA, 17 bp, Arabidopsis thaliana
ttgacgaggacttggaa

SEQ ID NO: 184462 - DNA, 17 bp, Arabidopsis thaliana
ttgacgcggattacgga

SEQ ID NO: 184463 - DNA, 17 bp, Arabidopsis thaliana
ttgacgcggattacggt

SEQ ID NO: 184464 - DNA, 17 bp, Arabidopsis thaliana
ttgacggaagagagtga

SEQ ID NO: 184465 - DNA, 17 bp, Arabidopsis thaliana
ttgacggaagggcacca

SEQ ID NO: 184466 - DNA, 17 bp, Arabidopsis thaliana
ttgacggaattgtggcg

SEQ ID NO: 184467 - DNA, 17 bp, Arabidopsis thaliana
ttgacgggggcccgcac

SEQ ID NO: 184468 - DNA, 17 bp, Arabidopsis thaliana
ttgactacgtccctgcc

SEQ ID NO: 184469 - DNA, 17 bp, Arabidopsis thaliana
ttgactacgtccctgct

SEQ ID NO: 184470 - DNA, 17 bp, Arabidopsis thaliana
ttgactattggatgacg

SEQ ID NO: 184471 - DNA, 17 bp, Arabidopsis thaliana
ttgactcaggcggattc

SEQ ID NO: 184472 - DNA, 17 bp, Arabidopsis thaliana
ttgactctagtccgact

SEQ ID NO: 184473 - DNA, 17 bp, Arabidopsis thaliana
ttgactctgctcagctg

SEQ ID NO: 184474 - DNA, 17 bp, Arabidopsis thaliana
ttgactgcattaacttg

SEQ ID NO: 184475 - DNA, 17 bp, Arabidopsis thaliana
ttgactggtcacttatc

SEQ ID NO: 184476 - DNA, 17 bp, Arabidopsis thaliana
ttgacttgtctaacatc

SEQ ID NO: 184477 - DNA, 17 bp, Arabidopsis thaliana
ttgagaagagatagaat

SEQ ID NO: 184478 - DNA, 17 bp, Arabidopsis thaliana
ttgagaagcagggcacg

SEQ ID NO: 184479 - DNA, 17 bp, Arabidopsis thaliana
ttgagacaaatcattac

SEQ ID NO: 184480 - DNA, 17 bp, Arabidopsis thaliana
ttgagacctatttactt

SEQ ID NO: 184481 - DNA, 17 bp, Arabidopsis thaliana
ttgagagagaaaagaca

SEQ ID NO: 184482 - DNA, 17 bp, Arabidopsis thaliana
ttgagagatcaagtttg

SEQ ID NO: 184483 - DNA, 17 bp, Arabidopsis thaliana
ttgagagcaacaagaca

SEQ ID NO: 184484 - DNA, 17 bp, Arabidopsis thaliana
ttgagatctgcgacatg

SEQ ID NO: 184485 - DNA, 17 bp, Arabidopsis thaliana
ttgagattctaaggata

SEQ ID NO: 184486 - DNA, 17 bp, Arabidopsis thaliana
ttgagattgtaaggata

SEQ ID NO: 184487 - DNA, 17 bp, Arabidopsis thaliana
ttgagccaaggatgact

SEQ ID NO: 184488 - DNA, 17 bp, Arabidopsis thaliana
ttgagccgagccaatat

SEQ ID NO: 184489 - DNA, 17 bp, Arabidopsis thaliana
ttgagccgtcccaatat

SEQ ID NO: 184490 - DNA, 17 bp, Arabidopsis thaliana
ttgagccgtgccaaaat

SEQ ID NO: 184491 - DNA, 17 bp, Arabidopsis thaliana
ttgagccgtgccaacat

SEQ ID NO: 184492 - DNA, 17 bp, Arabidopsis thaliana
ttgagccgtgccaacca

SEQ ID NO: 184493 - DNA, 17 bp, Arabidopsis thaliana
ttgagccgtgccaataa

SEQ ID NO: 184494 - DNA, 17 bp, Arabidopsis thaliana
ttgagccgtgccaatat

SEQ ID NO: 184495 - DNA, 17 bp, Arabidopsis thaliana
ttgagccgtgccaatgt

SEQ ID NO: 184496 - DNA, 17 bp, Arabidopsis thaliana
ttgagccgtgccactat

SEQ ID NO: 184497 - DNA, 17 bp, Arabidopsis thaliana
ttgagccgtgccagtat

SEQ ID NO: 184498 - DNA, 17 bp, Arabidopsis thaliana
ttgagccgtgcccatca

SEQ ID NO: 184499 - DNA, 17 bp, Arabidopsis thaliana
ttgagccgtgccgatat

SEQ ID NO: 184500 - DNA, 17 bp, Arabidopsis thaliana
ttgagccgtgcctatat

SEQ ID NO: 184501 - DNA, 17 bp, Arabidopsis thaliana
ttgagccgtgcgaatat

SEQ ID NO: 184502 - DNA, 17 bp, Arabidopsis thaliana
ttgagccgtgctaatat

SEQ ID NO: 184503 - DNA, 17 bp, Arabidopsis thaliana
ttgagccgttccaatat

SEQ ID NO: 184504 - DNA, 17 bp, Arabidopsis thaliana
ttgagctgtgccaatat

SEQ ID NO: 184505 - DNA, 17 bp, Arabidopsis thaliana
ttgaggaggacttggaa

SEQ ID NO: 184506 - DNA, 17 bp, Arabidopsis thaliana
ttgaggtccctactaaa

SEQ ID NO: 184507 - DNA, 17 bp, Arabidopsis thaliana
ttgaggtccctactgaa

SEQ ID NO: 184508 - DNA, 17 bp, Arabidopsis thaliana
ttgagtatagccctatc

SEQ ID NO: 184509 - DNA, 17 bp, Arabidopsis thaliana
ttgagtcactgtttagg

SEQ ID NO: 184510 - DNA, 17 bp, Arabidopsis thaliana
ttgagtcgcctctgact

SEQ ID NO: 184511 - DNA, 17 bp, Arabidopsis thaliana
ttgagtgaagccaagtt

SEQ ID NO: 184512 - DNA, 17 bp, Arabidopsis thaliana
ttgagtgagacagagga

SEQ ID NO: 184513 - DNA, 17 bp, Arabidopsis thaliana
ttgatcgctcaaagtat

SEQ ID NO: 184514 - DNA, 17 bp, Arabidopsis thaliana
ttgatcggatggtagaa

SEQ ID NO: 184515 - DNA, 17 bp, Arabidopsis thaliana
ttgatctcgatattttt

SEQ ID NO: 184516 - DNA, 17 bp, Arabidopsis thaliana
ttgatcttctgagaagg

SEQ ID NO: 184517 - DNA, 17 bp, Arabidopsis thaliana
ttgatcttgttagtttg

SEQ ID NO: 184518 - DNA, 17 bp, Arabidopsis thaliana
ttgatgaggacttggaa

SEQ ID NO: 184519 - DNA, 17 bp, Arabidopsis thaliana
ttgatgattcgacaaag

SEQ ID NO: 184520 - DNA, 17 bp, Arabidopsis thaliana
ttgatgtgcggccaaca

SEQ ID NO: 184521 - DNA, 17 bp, Arabidopsis thaliana
ttgatgtgtatcagttg

SEQ ID NO: 184522 - DNA, 17 bp, Arabidopsis thaliana
ttgattcaggtatggac

SEQ ID NO: 184523 - DNA, 17 bp, Arabidopsis thaliana
ttgattcccaagtaaat

SEQ ID NO: 184524 - DNA, 17 bp, Arabidopsis thaliana
ttgattggttaagtgat

SEQ ID NO: 184525 - DNA, 17 bp, Arabidopsis thaliana
ttgattgttaaagaaag

SEQ ID NO: 184526 - DNA, 17 bp, Arabidopsis thaliana
ttgatttgatttgattt

SEQ ID NO: 184527 - DNA, 17 bp, Arabidopsis thaliana
ttgatttggctttgagt

SEQ ID NO: 184528 - DNA, 17 bp, Arabidopsis thaliana
ttgattttactgtataa

SEQ ID NO: 184529 - DNA, 17 bp, Arabidopsis thaliana
ttgcaaagatcagcaag

SEQ ID NO: 184530 - DNA, 17 bp, Arabidopsis thaliana
ttgcaacgttttctttc

SEQ ID NO: 184531 - DNA, 17 bp, Arabidopsis thaliana
ttgcaaggatgagcaaa

SEQ ID NO: 184532 - DNA, 17 bp, Arabidopsis thaliana
ttgcaaggggctgagtt

SEQ ID NO: 184533 - DNA, 17 bp, Arabidopsis thaliana
ttgcaaggttcaagaaa

SEQ ID NO: 184534 - DNA, 17 bp, Arabidopsis thaliana
ttgcaaggttcaagaac

SEQ ID NO: 184535 - DNA, 17 bp, Arabidopsis thaliana
ttgcaatgatgagatct

SEQ ID NO: 184536 - DNA, 17 bp, Arabidopsis thaliana
ttgcacaaagccggact

SEQ ID NO: 184537 - DNA, 17 bp, Arabidopsis thaliana
ttgcacactgatgctga

SEQ ID NO: 184538 - DNA, 17 bp, Arabidopsis thaliana
ttgcacaggtgagaaat

SEQ ID NO: 184539 - DNA, 17 bp, Arabidopsis thaliana
ttgcactgaagggagca

SEQ ID NO: 184540 - DNA, 17 bp, Arabidopsis thaliana
ttgcactgaagggagct

SEQ ID NO: 184541 - DNA, 17 bp, Arabidopsis thaliana
ttgcactgcttcatgcc

SEQ ID NO: 184542 - DNA, 17 bp, Arabidopsis thaliana
ttgcagaatcccgtgaa

SEQ ID NO: 184543 - DNA, 17 bp, Arabidopsis thaliana
ttgcagagacaagttga

SEQ ID NO: 184544 - DNA, 17 bp, Arabidopsis thaliana
ttgcagagagaaatcac

SEQ ID NO: 184545 - DNA, 17 bp, Arabidopsis thaliana
ttgcagccaaaaccaca

SEQ ID NO: 184546 - DNA, 17 bp, Arabidopsis thaliana
ttgcagccaaaaccaga

SEQ ID NO: 184547 - DNA, 17 bp, Arabidopsis thaliana
ttgcagcgttgtttgtc

SEQ ID NO: 184548 - DNA, 17 bp, Arabidopsis thaliana
ttgcaggtaggccacat

SEQ ID NO: 184549 - DNA, 17 bp, Arabidopsis thaliana
ttgcagtagcaggagca

SEQ ID NO: 184550 - DNA, 17 bp, Arabidopsis thaliana
ttgcatatactcgaata

SEQ ID NO: 184551 - DNA, 17 bp, Arabidopsis thaliana
ttgcatatcctggaata

SEQ ID NO: 184552 - DNA, 17 bp, Arabidopsis thaliana
ttgcatatctcaggagc

SEQ ID NO: 184553 - DNA, 17 bp, Arabidopsis thaliana
ttgcatctaccacatta

SEQ ID NO: 184554 - DNA, 17 bp, Arabidopsis thaliana
ttgcatctaccacattc

SEQ ID NO: 184555 - DNA, 17 bp, Arabidopsis thaliana
ttgcatgatgtaacggc

SEQ ID NO: 184556 - DNA, 17 bp, Arabidopsis thaliana
ttgccaaggatgacttg

SEQ ID NO: 184557 - DNA, 17 bp, Arabidopsis thaliana
ttgccaaggatgttttc

SEQ ID NO: 184558 - DNA, 17 bp, Arabidopsis thaliana
ttgccacttgcactcaa

SEQ ID NO: 184559 - DNA, 17 bp, Arabidopsis thaliana
ttgccatcctgggtagt

SEQ ID NO: 184560 - DNA, 17 bp, Arabidopsis thaliana
ttgccatgagcgttcag

SEQ ID NO: 184561 - DNA, 17 bp, Arabidopsis thaliana
ttgccccaagcgcaaag

SEQ ID NO: 184562 - DNA, 17 bp, Arabidopsis thaliana
ttgccgaccagggatca

SEQ ID NO: 184563 - DNA, 17 bp, Arabidopsis thaliana
ttgccgaccctcagtag

SEQ ID NO: 184564 - DNA, 17 bp, Arabidopsis thaliana
ttgccgttggggaagaa

SEQ ID NO: 184565 - DNA, 17 bp, Arabidopsis thaliana
ttgcctaagtccgttcg

SEQ ID NO: 184566 - DNA, 17 bp, Arabidopsis thaliana
ttgcctgactgggagct

SEQ ID NO: 184567 - DNA, 17 bp, Arabidopsis thaliana
ttgcgaaaggtcgccgg

SEQ ID NO: 184568 - DNA, 17 bp, Arabidopsis thaliana
ttgcgaagcttctcggt

SEQ ID NO: 184569 - DNA, 17 bp, Arabidopsis thaliana
ttgcgacgagtttgcga

SEQ ID NO: 184570 - DNA, 17 bp, Arabidopsis thaliana
ttgcgatgatgatgttg

SEQ ID NO: 184571 - DNA, 17 bp, Arabidopsis thaliana
ttgcgatggtccctgcg

SEQ ID NO: 184572 - DNA, 17 bp, Arabidopsis thaliana
ttgcgattggttgtgat

SEQ ID NO: 184573 - DNA, 17 bp, Arabidopsis thaliana
ttgcgcaggggccatgc

SEQ ID NO: 184574 - DNA, 17 bp, Arabidopsis thaliana
ttgcgcataccaaatca

SEQ ID NO: 184575 - DNA, 17 bp, Arabidopsis thaliana
ttgcgcataccaaatcg

SEQ ID NO: 184576 - DNA, 17 bp, Arabidopsis thaliana
ttgcgccccaagccttc

SEQ ID NO: 184577 - DNA, 17 bp, Arabidopsis thaliana
ttgcgccgaagctccca

SEQ ID NO: 184578 - DNA, 17 bp, Arabidopsis thaliana
ttgcggacgacggaccc

SEQ ID NO: 184579 - DNA, 17 bp, Arabidopsis thaliana
ttgcggactgcttggtg

SEQ ID NO: 184580 - DNA, 17 bp, Arabidopsis thaliana
ttgcggagagaatagga

SEQ ID NO: 184581 - DNA, 17 bp, Arabidopsis thaliana
ttgcggcggcgatccat

SEQ ID NO: 184582 - DNA, 17 bp, Arabidopsis thaliana
ttgcggctttgcggagg

SEQ ID NO: 184583 - DNA, 17 bp, Arabidopsis thaliana
ttgcgggagaagccaat

SEQ ID NO: 184584 - DNA, 17 bp, Arabidopsis thaliana
ttgcgtaaagcttctta

SEQ ID NO: 184585 - DNA, 17 bp, Arabidopsis thaliana
ttgcgtcgcttaagtgg

SEQ ID NO: 184586 - DNA, 17 bp, Arabidopsis thaliana
ttgcgtcgttgtgcctg

SEQ ID NO: 184587 - DNA, 17 bp, Arabidopsis thaliana
ttgcgttatcgggtcgg

SEQ ID NO: 184588 - DNA, 17 bp, Arabidopsis thaliana
ttgctaaggcatgaaca

SEQ ID NO: 184589 - DNA, 17 bp, Arabidopsis thaliana
ttgctaagtttggatgc

SEQ ID NO: 184590 - DNA, 17 bp, Arabidopsis thaliana
ttgctactgcctgctga

SEQ ID NO: 184591 - DNA, 17 bp, Arabidopsis thaliana
ttgctcattgtcactgc

SEQ ID NO: 184592 - DNA, 17 bp, Arabidopsis thaliana
ttgctccaggctgattt

SEQ ID NO: 184593 - DNA, 17 bp, Arabidopsis thaliana
ttgctcgcaggtggatg

SEQ ID NO: 184594 - DNA, 17 bp, Arabidopsis thaliana
ttgctctacgctttatc

SEQ ID NO: 184595 - DNA, 17 bp, Arabidopsis thaliana
ttgctctgctaggcgga

SEQ ID NO: 184596 - DNA, 17 bp, Arabidopsis thaliana
ttgctgcaactcttgcg

SEQ ID NO: 184597 - DNA, 17 bp, Arabidopsis thaliana
ttgctggtctagagatt

SEQ ID NO: 184598 - DNA, 17 bp, Arabidopsis thaliana
ttgctgttgacttattc

SEQ ID NO: 184599 - DNA, 17 bp, Arabidopsis thaliana
ttgcttagcctgtacga

SEQ ID NO: 184600 - DNA, 17 bp, Arabidopsis thaliana
ttgcttctggagatact

SEQ ID NO: 184601 - DNA, 17 bp, Arabidopsis thaliana
ttgcttgctgggctagt

SEQ ID NO: 184602 - DNA, 17 bp, Arabidopsis thaliana
ttgcttggtgcaggtcg

SEQ ID NO: 184603 - DNA, 17 bp, Arabidopsis thaliana
ttgcttgtgaatacgag

SEQ ID NO: 184604 - DNA, 17 bp, Arabidopsis thaliana
ttgctttgactacaaaa

SEQ ID NO: 184605 - DNA, 17 bp, Arabidopsis thaliana
ttggaaaacatgattaa

SEQ ID NO: 184606 - DNA, 17 bp, Arabidopsis thaliana
ttggaaaacatgattag

SEQ ID NO: 184607 - DNA, 17 bp, Arabidopsis thaliana
ttggaaattgaagacaa

SEQ ID NO: 184608 - DNA, 17 bp, Arabidopsis thaliana
ttggaaattgaagacag

SEQ ID NO: 184609 - DNA, 17 bp, Arabidopsis thaliana
ttggaactttccttcgg

SEQ ID NO: 184610 - DNA, 17 bp, Arabidopsis thaliana
ttggaagaaaactttct

SEQ ID NO: 184611 - DNA, 17 bp, Arabidopsis thaliana
ttggaagatcgagtaga

SEQ ID NO: 184612 - DNA, 17 bp, Arabidopsis thaliana
ttggaagcgacccgcgt

SEQ ID NO: 184613 - DNA, 17 bp, Arabidopsis thaliana
ttggaagtgactacata

SEQ ID NO: 184614 - DNA, 17 bp, Arabidopsis thaliana
ttggaagtgactacatc

SEQ ID NO: 184615 - DNA, 17 bp, Arabidopsis thaliana
ttggaataccctggata

SEQ ID NO: 184616 - DNA, 17 bp, Arabidopsis thaliana
ttggaattttcgtgttg

SEQ ID NO: 184617 - DNA, 17 bp, Arabidopsis thaliana
ttggacatattccaggt

SEQ ID NO: 184618 - DNA, 17 bp, Arabidopsis thaliana
ttggaccaggcttcatt

SEQ ID NO: 184619 - DNA, 17 bp, Arabidopsis thaliana
ttggacgtggtcggggt

SEQ ID NO: 184620 - DNA, 17 bp, Arabidopsis thaliana
ttggactaccatcataa

SEQ ID NO: 184621 - DNA, 17 bp, Arabidopsis thaliana
ttggactagatcagtct

SEQ ID NO: 184622 - DNA, 17 bp, Arabidopsis thaliana
ttggactgaagggagca

SEQ ID NO: 184623 - DNA, 17 bp, Arabidopsis thaliana
ttggactgaagggagct

SEQ ID NO: 184624 - DNA, 17 bp, Arabidopsis thaliana
ttggactgaagggagtt

SEQ ID NO: 184625 - DNA, 17 bp, Arabidopsis thaliana
ttggactgggcagccca

SEQ ID NO: 184626 - DNA, 17 bp, Arabidopsis thaliana
ttggacttaagggagct

SEQ ID NO: 184627 - DNA, 17 bp, Arabidopsis thaliana
ttggagactgaagcgtt

SEQ ID NO: 184628 - DNA, 17 bp, Arabidopsis thaliana
ttggagaggacttggaa

SEQ ID NO: 184629 - DNA, 17 bp, Arabidopsis thaliana
ttggaggacggagattc

SEQ ID NO: 184630 - DNA, 17 bp, Arabidopsis thaliana
ttggaggatgctgctaa

SEQ ID NO: 184631 - DNA, 17 bp, Arabidopsis thaliana
ttggataaagacattga

SEQ ID NO: 184632 - DNA, 17 bp, Arabidopsis thaliana
ttggataaagacattgt

SEQ ID NO: 184633 - DNA, 17 bp, Arabidopsis thaliana
ttggatactagaaaaaa

SEQ ID NO: 184634 - DNA, 17 bp, Arabidopsis thaliana
ttggatacttttcaaaa

SEQ ID NO: 184635 - DNA, 17 bp, Arabidopsis thaliana
ttggatcccgccttgca

SEQ ID NO: 184636 - DNA, 17 bp, Arabidopsis thaliana
ttggatcgaagggagct

SEQ ID NO: 184637 - DNA, 17 bp, Arabidopsis thaliana
ttggatcgggtatgctt

SEQ ID NO: 184638 - DNA, 17 bp, Arabidopsis thaliana
ttggatcttaggaaatc

SEQ ID NO: 184639 - DNA, 17 bp, Arabidopsis thaliana
ttggatgatcgggctga

SEQ ID NO: 184640 - DNA, 17 bp, Arabidopsis thaliana
ttggatgatgagaaaca

SEQ ID NO: 184641 - DNA, 17 bp, Arabidopsis thaliana
ttggatgatggaaaaac

SEQ ID NO: 184642 - DNA, 17 bp, Arabidopsis thaliana
ttggatgctgctcagct

SEQ ID NO: 184643 - DNA, 17 bp, Arabidopsis thaliana
ttggattgaagggagca

SEQ ID NO: 184644 - DNA, 17 bp, Arabidopsis thaliana
ttggattgaagggagct

SEQ ID NO: 184645 - DNA, 17 bp, Arabidopsis thaliana
ttggatttagcaaacat

SEQ ID NO: 184646 - DNA, 17 bp, Arabidopsis thaliana
ttggatttatgaaagaa

SEQ ID NO: 184647 - DNA, 17 bp, Arabidopsis thaliana
ttggatttgggctgcag

SEQ ID NO: 184648 - DNA, 17 bp, Arabidopsis thaliana
ttggcaaatgctttcgc

SEQ ID NO: 184649 - DNA, 17 bp, Arabidopsis thaliana
ttggcacggctcaagaa

SEQ ID NO: 184650 - DNA, 17 bp, Arabidopsis thaliana
ttggcacggctcaagat

SEQ ID NO: 184651 - DNA, 17 bp, Arabidopsis thaliana
ttggcagaagaaagaga

SEQ ID NO: 184652 - DNA, 17 bp, Arabidopsis thaliana
ttggcaggacgagtttg

SEQ ID NO: 184653 - DNA, 17 bp, Arabidopsis thaliana
ttggcattctgcccacc

SEQ ID NO: 184654 - DNA, 17 bp, Arabidopsis thaliana
ttggcattctgtccacc

SEQ ID NO: 184655 - DNA, 17 bp, Arabidopsis thaliana
ttggcattctgtccact

SEQ ID NO: 184656 - DNA, 17 bp, Arabidopsis thaliana
ttggcattctgtcctcc

SEQ ID NO: 184657 - DNA, 17 bp, Arabidopsis thaliana
ttggcattctgtccttc

SEQ ID NO: 184658 - DNA, 17 bp, Arabidopsis thaliana
ttggcattttgtccacc

SEQ ID NO: 184659 - DNA, 17 bp, Arabidopsis thaliana
ttggccaggtagtcagc

SEQ ID NO: 184660 - DNA, 17 bp, Arabidopsis thaliana
ttggcccatgtcgttat

SEQ ID NO: 184661 - DNA, 17 bp, Arabidopsis thaliana
ttggccccatagaaaaa

SEQ ID NO: 184662 - DNA, 17 bp, Arabidopsis thaliana
ttggccgacaggcccgg

SEQ ID NO: 184663 - DNA, 17 bp, Arabidopsis thaliana
ttggccggagttgtgga

SEQ ID NO: 184664 - DNA, 17 bp, Arabidopsis thaliana
ttggcctatagcctgca

SEQ ID NO: 184665 - DNA, 17 bp, Arabidopsis thaliana
ttggcgctatccatcct

SEQ ID NO: 184666 - DNA, 17 bp, Arabidopsis thaliana
ttggcggagcgatttgt

SEQ ID NO: 184667 - DNA, 17 bp, Arabidopsis thaliana
ttggcgtatagcccggc

SEQ ID NO: 184668 - DNA, 17 bp, Arabidopsis thaliana
ttggcgtcgctcagaac

SEQ ID NO: 184669 - DNA, 17 bp, Arabidopsis thaliana
ttggcgtcgctcagacc

SEQ ID NO: 184670 - DNA, 17 bp, Arabidopsis thaliana
ttggctaaagcagcacg

SEQ ID NO: 184671 - DNA, 17 bp, Arabidopsis thaliana
ttggctaagtccgttcg

SEQ ID NO: 184672 - DNA, 17 bp, Arabidopsis thaliana
ttggctcaggcggttct

SEQ ID NO: 184673 - DNA, 17 bp, Arabidopsis thaliana
ttggctggggcggcaca

SEQ ID NO: 184674 - DNA, 17 bp, Arabidopsis thaliana
ttggcttactgcgtcag

SEQ ID NO: 184675 - DNA, 17 bp, Arabidopsis thaliana
ttggcttctaccgcaag

SEQ ID NO: 184676 - DNA, 17 bp, Arabidopsis thaliana
ttggcttctaccgcgct

SEQ ID NO: 184677 - DNA, 17 bp, Arabidopsis thaliana
ttggcttggtgagatcc

SEQ ID NO: 184678 - DNA, 17 bp, Arabidopsis thaliana
ttggctttgagtttgtt

SEQ ID NO: 184679 - DNA, 17 bp, Arabidopsis thaliana
ttggcttttaccgcaag

SEQ ID NO: 184680 - DNA, 17 bp, Arabidopsis thaliana
ttgggacgagatgtttt

SEQ ID NO: 184681 - DNA, 17 bp, Arabidopsis thaliana
ttgggacgcagtgacca

SEQ ID NO: 184682 - DNA, 17 bp, Arabidopsis thaliana
ttgggagtagccatata

SEQ ID NO: 184683 - DNA, 17 bp, Arabidopsis thaliana
ttgggagttgtaaaatt

SEQ ID NO: 184684 - DNA, 17 bp, Arabidopsis thaliana
ttgggatcatactgacc

SEQ ID NO: 184685 - DNA, 17 bp, Arabidopsis thaliana
ttgggatggatcggccg

SEQ ID NO: 184686 - DNA, 17 bp, Arabidopsis thaliana
ttgggatgggtcggccg

SEQ ID NO: 184687 - DNA, 17 bp, Arabidopsis thaliana
ttgggcaactgcgtggt

SEQ ID NO: 184688 - DNA, 17 bp, Arabidopsis thaliana
ttgggcgagagtagtac

SEQ ID NO: 184689 - DNA, 17 bp, Arabidopsis thaliana
ttggggaagaatcgcga

SEQ ID NO: 184690 - DNA, 17 bp, Arabidopsis thaliana
ttggggaagcggtcttt

SEQ ID NO: 184691 - DNA, 17 bp, Arabidopsis thaliana
ttggggacgagatgtct

SEQ ID NO: 184692 - DNA, 17 bp, Arabidopsis thaliana
ttggggacgagatgttt

SEQ ID NO: 184693 - DNA, 17 bp, Arabidopsis thaliana
ttggggatgggtctttt

SEQ ID NO: 184694 - DNA, 17 bp, Arabidopsis thaliana
ttggggattttgttttc

SEQ ID NO: 184695 - DNA, 17 bp, Arabidopsis thaliana
ttggggtgcgagaggtc

SEQ ID NO: 184696 - DNA, 17 bp, Arabidopsis thaliana
ttgggtaagagatttgc

SEQ ID NO: 184697 - DNA, 17 bp, Arabidopsis thaliana
ttgggtaagttttcaaa

SEQ ID NO: 184698 - DNA, 17 bp, Arabidopsis thaliana
ttgggtagcgatcgagg

SEQ ID NO: 184699 - DNA, 17 bp, Arabidopsis thaliana
ttgggtatcaatagggt

SEQ ID NO: 184700 - DNA, 17 bp, Arabidopsis thaliana
ttgggtcccaaatccgg

SEQ ID NO: 184701 - DNA, 17 bp, Arabidopsis thaliana
ttgggtcgttgcgatta

SEQ ID NO: 184702 - DNA, 17 bp, Arabidopsis thaliana
ttgggtctctgttttca

SEQ ID NO: 184703 - DNA, 17 bp, Arabidopsis thaliana
ttgggttccggggggag

SEQ ID NO: 184704 - DNA, 17 bp, Arabidopsis thaliana
ttgggttgctatgttgg

SEQ ID NO: 184705 - DNA, 17 bp, Arabidopsis thaliana
ttggtagacacgctgct

SEQ ID NO: 184706 - DNA, 17 bp, Arabidopsis thaliana
ttggtcaatactttttt

SEQ ID NO: 184707 - DNA, 17 bp, Arabidopsis thaliana
ttggtcatcgcgcttgg

SEQ ID NO: 184708 - DNA, 17 bp, Arabidopsis thaliana
ttggtcggcttgtccct

SEQ ID NO: 184709 - DNA, 17 bp, Arabidopsis thaliana
ttggtctgttggcgaat

SEQ ID NO: 184710 - DNA, 17 bp, Arabidopsis thaliana
ttggtcttcagaaagtt

SEQ ID NO: 184711 - DNA, 17 bp, Arabidopsis thaliana
ttggtgaaactagtatg

SEQ ID NO: 184712 - DNA, 17 bp, Arabidopsis thaliana
ttggtgaaccagcggag

SEQ ID NO: 184713 - DNA, 17 bp, Arabidopsis thaliana
ttggtgaaggcaatgac

SEQ ID NO: 184714 - DNA, 17 bp, Arabidopsis thaliana
ttggtgacggagaatgc

SEQ ID NO: 184715 - DNA, 17 bp, Arabidopsis thaliana
ttggtgactcgacaaag

SEQ ID NO: 184716 - DNA, 17 bp, Arabidopsis thaliana
ttggtggagcgatttgt

SEQ ID NO: 184717 - DNA, 17 bp, Arabidopsis thaliana
ttggttacccatatggc

SEQ ID NO: 184718 - DNA, 17 bp, Arabidopsis thaliana
ttggttacccatggcca

SEQ ID NO: 184719 - DNA, 17 bp, Arabidopsis thaliana
ttggttactgctactgc

SEQ ID NO: 184720 - DNA, 17 bp, Arabidopsis thaliana
ttggttaggaaggtatt

SEQ ID NO: 184721 - DNA, 17 bp, Arabidopsis thaliana
ttggttcagttggtttt

SEQ ID NO: 184722 - DNA, 17 bp, Arabidopsis thaliana
ttggttctttgaggttt

SEQ ID NO: 184723 - DNA, 17 bp, Arabidopsis thaliana
ttggttgttgttcgcag

SEQ ID NO: 184724 - DNA, 17 bp, Arabidopsis thaliana
ttggtttgttcaaagac

SEQ ID NO: 184725 - DNA, 17 bp, Arabidopsis thaliana
ttggtttgttgtttcta

SEQ ID NO: 184726 - DNA, 17 bp, Arabidopsis thaliana
ttgtaaagagatttgta

SEQ ID NO: 184727 - DNA, 17 bp, Arabidopsis thaliana
ttgtaacgtgcttgctt

SEQ ID NO: 184728 - DNA, 17 bp, Arabidopsis thaliana
ttgtaagaccccatcct

SEQ ID NO: 184729 - DNA, 17 bp, Arabidopsis thaliana
ttgtaagaccccatcta

SEQ ID NO: 184730 - DNA, 17 bp, Arabidopsis thaliana
ttgtaagaccccatctc

SEQ ID NO: 184731 - DNA, 17 bp, Arabidopsis thaliana
ttgtaagaccccatctt

SEQ ID NO: 184732 - DNA, 17 bp, Arabidopsis thaliana
ttgtaagaccttttctc

SEQ ID NO: 184733 - DNA, 17 bp, Arabidopsis thaliana
ttgtaaggcttttcctt

SEQ ID NO: 184734 - DNA, 17 bp, Arabidopsis thaliana
ttgtaagtctaagcaaa

SEQ ID NO: 184735 - DNA, 17 bp, Arabidopsis thaliana
ttgtaagtgaaaatatc

SEQ ID NO: 184736 - DNA, 17 bp, Arabidopsis thaliana
ttgtaagtggcagagtg

SEQ ID NO: 184737 - DNA, 17 bp, Arabidopsis thaliana
ttgtaatgggtgttgtg

SEQ ID NO: 184738 - DNA, 17 bp, Arabidopsis thaliana
ttgtaatttcaaaatta

SEQ ID NO: 184739 - DNA, 17 bp, Arabidopsis thaliana
ttgtaatttcaaaattg

SEQ ID NO: 184740 - DNA, 17 bp, Arabidopsis thaliana
ttgtaccagcactgttt

SEQ ID NO: 184741 - DNA, 17 bp, Arabidopsis thaliana
ttgtactcgacatttga

SEQ ID NO: 184742 - DNA, 17 bp, Arabidopsis thaliana
ttgtactctttcatcag

SEQ ID NO: 184743 - DNA, 17 bp, Arabidopsis thaliana
ttgtacttgctgtaata

SEQ ID NO: 184744 - DNA, 17 bp, Arabidopsis thaliana
ttgtagacgttgacaaa

SEQ ID NO: 184745 - DNA, 17 bp, Arabidopsis thaliana
ttgtagacgttgacaat

SEQ ID NO: 184746 - DNA, 17 bp, Arabidopsis thaliana
ttgtagaggacttggaa

SEQ ID NO: 184747 - DNA, 17 bp, Arabidopsis thaliana
ttgtagatcacaacatc

SEQ ID NO: 184748 - DNA, 17 bp, Arabidopsis thaliana
ttgtagttgctgatgac

SEQ ID NO: 184749 - DNA, 17 bp, Arabidopsis thaliana
ttgtatcatcaactgtt

SEQ ID NO: 184750 - DNA, 17 bp, Arabidopsis thaliana
ttgtcaacgtctacgaa

SEQ ID NO: 184751 - DNA, 17 bp, Arabidopsis thaliana
ttgtcaactttgtgagc

SEQ ID NO: 184752 - DNA, 17 bp, Arabidopsis thaliana
ttgtcagtataaatctt

SEQ ID NO: 184753 - DNA, 17 bp, Arabidopsis thaliana
ttgtcataaggttcgtg

SEQ ID NO: 184754 - DNA, 17 bp, Arabidopsis thaliana
ttgtccaccgaaaatcg

SEQ ID NO: 184755 - DNA, 17 bp, Arabidopsis thaliana
ttgtccattgacgagag

SEQ ID NO: 184756 - DNA, 17 bp, Arabidopsis thaliana
ttgtccccgatttcatc

SEQ ID NO: 184757 - DNA, 17 bp, Arabidopsis thaliana
ttgtccctaatcatgtt

SEQ ID NO: 184758 - DNA, 17 bp, Arabidopsis thaliana
ttgtcccttcggtcggc

SEQ ID NO: 184759 - DNA, 17 bp, Arabidopsis thaliana
ttgtcgctaagattcga

SEQ ID NO: 184760 - DNA, 17 bp, Arabidopsis thaliana
ttgtcggaagattcagg

SEQ ID NO: 184761 - DNA, 17 bp, Arabidopsis thaliana
ttgtcggcacttgagaa

SEQ ID NO: 184762 - DNA, 17 bp, Arabidopsis thaliana
ttgtcgggagggaagcg

SEQ ID NO: 184763 - DNA, 17 bp, Arabidopsis thaliana
ttgtctaaaagcacata

SEQ ID NO: 184764 - DNA, 17 bp, Arabidopsis thaliana
ttgtctaaaagcacatc

SEQ ID NO: 184765 - DNA, 17 bp, Arabidopsis thaliana
ttgtctacaattttgga

SEQ ID NO: 184766 - DNA, 17 bp, Arabidopsis thaliana
ttgtctaggtaagagta

SEQ ID NO: 184767 - DNA, 17 bp, Arabidopsis thaliana
ttgtctcaaagattaaa

SEQ ID NO: 184768 - DNA, 17 bp, Arabidopsis thaliana
ttgtctcaaagattaag

SEQ ID NO: 184769 - DNA, 17 bp, Arabidopsis thaliana
ttgtctccacttggatc

SEQ ID NO: 184770 - DNA, 17 bp, Arabidopsis thaliana
ttgtctccgattagaaa

SEQ ID NO: 184771 - DNA, 17 bp, Arabidopsis thaliana
ttgtctgagaggaatcc

SEQ ID NO: 184772 - DNA, 17 bp, Arabidopsis thaliana
ttgtctgagaggaattc

SEQ ID NO: 184773 - DNA, 17 bp, Arabidopsis thaliana
ttgtctgattttttttc

SEQ ID NO: 184774 - DNA, 17 bp, Arabidopsis thaliana
ttgtctggttaattccg

SEQ ID NO: 184775 - DNA, 17 bp, Arabidopsis thaliana
ttgtcttgattttgttt

SEQ ID NO: 184776 - DNA, 17 bp, Arabidopsis thaliana
ttgtcttgtctgctcgt

SEQ ID NO: 184777 - DNA, 17 bp, Arabidopsis thaliana
ttgtgaagaaaaagtcc

SEQ ID NO: 184778 - DNA, 17 bp, Arabidopsis thaliana
ttgtgaagtctacatga

SEQ ID NO: 184779 - DNA, 17 bp, Arabidopsis thaliana
ttgtgacaagtccaatg

SEQ ID NO: 184780 - DNA, 17 bp, Arabidopsis thaliana
ttgtgacaatgtgaaca

SEQ ID NO: 184781 - DNA, 17 bp, Arabidopsis thaliana
ttgtgaccaacatttac

SEQ ID NO: 184782 - DNA, 17 bp, Arabidopsis thaliana
ttgtgatccaagtggag

SEQ ID NO: 184783 - DNA, 17 bp, Arabidopsis thaliana
ttgtgccaaaacaaccg

SEQ ID NO: 184784 - DNA, 17 bp, Arabidopsis thaliana
ttgtgcgatatgttgcg

SEQ ID NO: 184785 - DNA, 17 bp, Arabidopsis thaliana
ttgtggactatgaatgg

SEQ ID NO: 184786 - DNA, 17 bp, Arabidopsis thaliana
ttgtggactgcttggcg

SEQ ID NO: 184787 - DNA, 17 bp, Arabidopsis thaliana
ttgtggactgcttggtg

SEQ ID NO: 184788 - DNA, 17 bp, Arabidopsis thaliana
ttgtggcagccaagcgt

SEQ ID NO: 184789 - DNA, 17 bp, Arabidopsis thaliana
ttgtggccgaagtcgaa

SEQ ID NO: 184790 - DNA, 17 bp, Arabidopsis thaliana
ttgtggcgcgaacggac

SEQ ID NO: 184791 - DNA, 17 bp, Arabidopsis thaliana
ttgtggcgttggtttct

SEQ ID NO: 184792 - DNA, 17 bp, Arabidopsis thaliana
ttgtggtccagggattc

SEQ ID NO: 184793 - DNA, 17 bp, Arabidopsis thaliana
ttgtgtcccactgggtg

SEQ ID NO: 184794 - DNA, 17 bp, Arabidopsis thaliana
ttgtgttacttagtact

SEQ ID NO: 184795 - DNA, 17 bp, Arabidopsis thaliana
ttgtgttgaaaaagccc

SEQ ID NO: 184796 - DNA, 17 bp, Arabidopsis thaliana
ttgtgtttaggcttttt

SEQ ID NO: 184797 - DNA, 17 bp, Arabidopsis thaliana
ttgttacacattgcctt

SEQ ID NO: 184798 - DNA, 17 bp, Arabidopsis thaliana
ttgttactggagaacgt

SEQ ID NO: 184799 - DNA, 17 bp, Arabidopsis thaliana
ttgttatcggtgcgtct

SEQ ID NO: 184800 - DNA, 17 bp, Arabidopsis thaliana
ttgttattcaagatttt

SEQ ID NO: 184801 - DNA, 17 bp, Arabidopsis thaliana
ttgttcgagaccatttt

SEQ ID NO: 184802 - DNA, 17 bp, Arabidopsis thaliana
ttgttgactacatggct

SEQ ID NO: 184803 - DNA, 17 bp, Arabidopsis thaliana
ttgttgagcaggataca

SEQ ID NO: 184804 - DNA, 17 bp, Arabidopsis thaliana
ttgttgagcaggatcca

SEQ ID NO: 184805 - DNA, 17 bp, Arabidopsis thaliana
ttgttgatcggatggta

SEQ ID NO: 184806 - DNA, 17 bp, Arabidopsis thaliana
ttgttgctggacgacgc

SEQ ID NO: 184807 - DNA, 17 bp, Arabidopsis thaliana
ttgttggctgctgtggc

SEQ ID NO: 184808 - DNA, 17 bp, Arabidopsis thaliana
ttgttgtgaccaacata

SEQ ID NO: 184809 - DNA, 17 bp, Arabidopsis thaliana
ttgttgtgaccaacatt

SEQ ID NO: 184810 - DNA, 17 bp, Arabidopsis thaliana
ttgttgtgaccagcatt

SEQ ID NO: 184811 - DNA, 17 bp, Arabidopsis thaliana
ttgttgttgatgatatc

SEQ ID NO: 184812 - DNA, 17 bp, Arabidopsis thaliana
ttgtttaccagtttgtt

SEQ ID NO: 184813 - DNA, 17 bp, Arabidopsis thaliana
ttgtttactgaaggagt

SEQ ID NO: 184814 - DNA, 17 bp, Arabidopsis thaliana
ttgtttaggtcccttag

SEQ ID NO: 184815 - DNA, 17 bp, Arabidopsis thaliana
ttgtttaggtctcttag

SEQ ID NO: 184816 - DNA, 17 bp, Arabidopsis thaliana
ttgtttcagacttatgt

SEQ ID NO: 184817 - DNA, 17 bp, Arabidopsis thaliana
ttgtttcccatgagatc

SEQ ID NO: 184818 - DNA, 17 bp, Arabidopsis thaliana
ttgtttcgggtcatagc

SEQ ID NO: 184819 - DNA, 17 bp, Arabidopsis thaliana
ttgtttgagatctgcga

SEQ ID NO: 184820 - DNA, 17 bp, Arabidopsis thaliana
ttgttttaggaaagctc

SEQ ID NO: 184821 - DNA, 17 bp, Arabidopsis thaliana
ttgttttcggggtttat

SEQ ID NO: 184822 - DNA, 17 bp, Arabidopsis thaliana
ttgttttcgtcgcatga

SEQ ID NO: 184823 - DNA, 17 bp, Arabidopsis thaliana
ttgttttcttttgcttt

SEQ ID NO: 184824 - DNA, 17 bp, Arabidopsis thaliana
ttgtttttgaaatgttt

SEQ ID NO: 184825 - DNA, 17 bp, Arabidopsis thaliana
tttaaagccaaatcagg

SEQ ID NO: 184826 - DNA, 17 bp, Arabidopsis thaliana
tttaaattggatgtttt

SEQ ID NO: 184827 - DNA, 17 bp, Arabidopsis thaliana
tttaaatttttcaggta

SEQ ID NO: 184828 - DNA, 17 bp, Arabidopsis thaliana
tttaacagcggaaccta

SEQ ID NO: 184829 - DNA, 17 bp, Arabidopsis thaliana
tttaacagcggaacctg

SEQ ID NO: 184830 - DNA, 17 bp, Arabidopsis thaliana
tttaacaggaatggtac

SEQ ID NO: 184831 - DNA, 17 bp, Arabidopsis thaliana
tttaactggtattcata

SEQ ID NO: 184832 - DNA, 17 bp, Arabidopsis thaliana
tttaagcgaatgatgat

SEQ ID NO: 184833 - DNA, 17 bp, Arabidopsis thaliana
tttaagtcttctattga

SEQ ID NO: 184834 - DNA, 17 bp, Arabidopsis thaliana
tttaatatctgatatgt

SEQ ID NO: 184835 - DNA, 17 bp, Arabidopsis thaliana
tttaatattcaaggaca

SEQ ID NO: 184836 - DNA, 17 bp, Arabidopsis thaliana
tttaatcccacttttgt

SEQ ID NO: 184837 - DNA, 17 bp, Arabidopsis thaliana
tttaatttttttttttt

SEQ ID NO: 184838 - DNA, 17 bp, Arabidopsis thaliana
tttacaaatgttatgtc

SEQ ID NO: 184839 - DNA, 17 bp, Arabidopsis thaliana
tttacaaggtgtcgtga

SEQ ID NO: 184840 - DNA, 17 bp, Arabidopsis thaliana
tttacagattctattct

SEQ ID NO: 184841 - DNA, 17 bp, Arabidopsis thaliana
tttacatctgcgtctgt

SEQ ID NO: 184842 - DNA, 17 bp, Arabidopsis thaliana
tttaccaacctttcatc

SEQ ID NO: 184843 - DNA, 17 bp, Arabidopsis thaliana
tttaccaattaaccgat

SEQ ID NO: 184844 - DNA, 17 bp, Arabidopsis thaliana
tttaccagtatcttatg

SEQ ID NO: 184845 - DNA, 17 bp, Arabidopsis thaliana
tttaccagtatgttatg

SEQ ID NO: 184846 - DNA, 17 bp, Arabidopsis thaliana
tttaccagttgttctcc

SEQ ID NO: 184847 - DNA, 17 bp, Arabidopsis thaliana
tttaccagtttgttctc

SEQ ID NO: 184848 - DNA, 17 bp, Arabidopsis thaliana
tttaccattttcattca

SEQ ID NO: 184849 - DNA, 17 bp, Arabidopsis thaliana
tttaccctactgatgcc

SEQ ID NO: 184850 - DNA, 17 bp, Arabidopsis thaliana
tttacccttggccatga

SEQ ID NO: 184851 - DNA, 17 bp, Arabidopsis thaliana
tttaccgggtccgagga

SEQ ID NO: 184852 - DNA, 17 bp, Arabidopsis thaliana
tttacgaaaggagaagc

SEQ ID NO: 184853 - DNA, 17 bp, Arabidopsis thaliana
tttacggggataagact

SEQ ID NO: 184854 - DNA, 17 bp, Arabidopsis thaliana
tttacgttgggcaactg

SEQ ID NO: 184855 - DNA, 17 bp, Arabidopsis thaliana
tttactactggagttgc

SEQ ID NO: 184856 - DNA, 17 bp, Arabidopsis thaliana
tttactatgctgccatc

SEQ ID NO: 184857 - DNA, 17 bp, Arabidopsis thaliana
tttactccttcttccgg

SEQ ID NO: 184858 - DNA, 17 bp, Arabidopsis thaliana
tttactctaatcgcgaa

SEQ ID NO: 184859 - DNA, 17 bp, Arabidopsis thaliana
tttactgagattcagcc

SEQ ID NO: 184860 - DNA, 17 bp, Arabidopsis thaliana
tttactgctacttgtgt

SEQ ID NO: 184861 - DNA, 17 bp, Arabidopsis thaliana
tttacttccagcttttg

SEQ ID NO: 184862 - DNA, 17 bp, Arabidopsis thaliana
tttacttctctggttgg

SEQ ID NO: 184863 - DNA, 17 bp, Arabidopsis thaliana
tttacttgggtatcaac

SEQ ID NO: 184864 - DNA, 17 bp, Arabidopsis thaliana
tttactttacggtgaaa

SEQ ID NO: 184865 - DNA, 17 bp, Arabidopsis thaliana
tttagaaattttgtttc

SEQ ID NO: 184866 - DNA, 17 bp, Arabidopsis thaliana
tttagaagatttttctt

SEQ ID NO: 184867 - DNA, 17 bp, Arabidopsis thaliana
tttagaccttcggaatt

SEQ ID NO: 184868 - DNA, 17 bp, Arabidopsis thaliana
tttagacgacttgaaaa

SEQ ID NO: 184869 - DNA, 17 bp, Arabidopsis thaliana
tttagacgcatcctgta

SEQ ID NO: 184870 - DNA, 17 bp, Arabidopsis thaliana
tttagatacactctgat

SEQ ID NO: 184871 - DNA, 17 bp, Arabidopsis thaliana
tttagcaactgctcttt

SEQ ID NO: 184872 - DNA, 17 bp, Arabidopsis thaliana
tttagccgtgccaatat

SEQ ID NO: 184873 - DNA, 17 bp, Arabidopsis thaliana
tttaggaaagctcgaac

SEQ ID NO: 184874 - DNA, 17 bp, Arabidopsis thaliana
tttaggaacctttttga

SEQ ID NO: 184875 - DNA, 17 bp, Arabidopsis thaliana
tttaggccaaggaagtt

SEQ ID NO: 184876 - DNA, 17 bp, Arabidopsis thaliana
tttaggtctccctccgg

SEQ ID NO: 184877 - DNA, 17 bp, Arabidopsis thaliana
tttagtagtttctgagc

SEQ ID NO: 184878 - DNA, 17 bp, Arabidopsis thaliana
tttagtcactttcaccg

SEQ ID NO: 184879 - DNA, 17 bp, Arabidopsis thaliana
tttagtcactttcactg

SEQ ID NO: 184880 - DNA, 17 bp, Arabidopsis thaliana
tttagtcgcatcctgag

SEQ ID NO: 184881 - DNA, 17 bp, Arabidopsis thaliana
tttagtcgcatcctgga

SEQ ID NO: 184882 - DNA, 17 bp, Arabidopsis thaliana
tttagtcgcatcctgta

SEQ ID NO: 184883 - DNA, 17 bp, Arabidopsis thaliana
tttagtcgcatctgtag

SEQ ID NO: 184884 - DNA, 17 bp, Arabidopsis thaliana
tttagtctctttgcacc

SEQ ID NO: 184885 - DNA, 17 bp, Arabidopsis thaliana
tttagtggatggtgctg

SEQ ID NO: 184886 - DNA, 17 bp, Arabidopsis thaliana
tttagtggtgtccgatt

SEQ ID NO: 184887 - DNA, 17 bp, Arabidopsis thaliana
tttatagggttggatac

SEQ ID NO: 184888 - DNA, 17 bp, Arabidopsis thaliana
tttatcactttgtttac

SEQ ID NO: 184889 - DNA, 17 bp, Arabidopsis thaliana
tttatcaggttggtact

SEQ ID NO: 184890 - DNA, 17 bp, Arabidopsis thaliana
tttatccagatgatgca

SEQ ID NO: 184891 - DNA, 17 bp, Arabidopsis thaliana
tttatcgctgtaggatt

SEQ ID NO: 184892 - DNA, 17 bp, Arabidopsis thaliana
tttatctagatgatgca

SEQ ID NO: 184893 - DNA, 17 bp, Arabidopsis thaliana
tttatctagatgattca

SEQ ID NO: 184894 - DNA, 17 bp, Arabidopsis thaliana
tttatctgcaacaggat

SEQ ID NO: 184895 - DNA, 17 bp, Arabidopsis thaliana
tttatcttgatgatgct

SEQ ID NO: 184896 - DNA, 17 bp, Arabidopsis thaliana
tttatgatgagtttata

SEQ ID NO: 184897 - DNA, 17 bp, Arabidopsis thaliana
tttatgcgagtgtttgg

SEQ ID NO: 184898 - DNA, 17 bp, Arabidopsis thaliana
tttatgtagtgctcatt

SEQ ID NO: 184899 - DNA, 17 bp, Arabidopsis thaliana
tttattagaaatttagg

SEQ ID NO: 184900 - DNA, 17 bp, Arabidopsis thaliana
tttattctattccacct

SEQ ID NO: 184901 - DNA, 17 bp, Arabidopsis thaliana
tttattgtctaggtaag

SEQ ID NO: 184902 - DNA, 17 bp, Arabidopsis thaliana
tttattgtttactgaag

SEQ ID NO: 184903 - DNA, 17 bp, Arabidopsis thaliana
tttcaaaactggttcgg

SEQ ID NO: 184904 - DNA, 17 bp, Arabidopsis thaliana
tttcaaaatacacaagt

SEQ ID NO: 184905 - DNA, 17 bp, Arabidopsis thaliana
tttcaaaattgacccga

SEQ ID NO: 184906 - DNA, 17 bp, Arabidopsis thaliana
tttcaaagattacccgg

SEQ ID NO: 184907 - DNA, 17 bp, Arabidopsis thaliana
tttcaaatgtagacaaa

SEQ ID NO: 184908 - DNA, 17 bp, Arabidopsis thaliana
tttcaacagccatatcc

SEQ ID NO: 184909 - DNA, 17 bp, Arabidopsis thaliana
tttcaacccgcaactca

SEQ ID NO: 184910 - DNA, 17 bp, Arabidopsis thaliana
tttcaagatctatggat

SEQ ID NO: 184911 - DNA, 17 bp, Arabidopsis thaliana
tttcaagtccaacatag

SEQ ID NO: 184912 - DNA, 17 bp, Arabidopsis thaliana
tttcaagtcgtctaaaa

SEQ ID NO: 184913 - DNA, 17 bp, Arabidopsis thaliana
tttcaagtcgtctaaag

SEQ ID NO: 184914 - DNA, 17 bp, Arabidopsis thaliana
tttcaagttcaacatat

SEQ ID NO: 184915 - DNA, 17 bp, Arabidopsis thaliana
tttcaatgcattgagat

SEQ ID NO: 184916 - DNA, 17 bp, Arabidopsis thaliana
tttcacagctttcttga

SEQ ID NO: 184917 - DNA, 17 bp, Arabidopsis thaliana
tttcaccaagccaagaa

SEQ ID NO: 184918 - DNA, 17 bp, Arabidopsis thaliana
tttcactggtaccaatc

SEQ ID NO: 184919 - DNA, 17 bp, Arabidopsis thaliana
tttcagatccatttcta

SEQ ID NO: 184920 - DNA, 17 bp, Arabidopsis thaliana
tttcagatctcaaatta

SEQ ID NO: 184921 - DNA, 17 bp, Arabidopsis thaliana
tttcaggcggctgaggg

SEQ ID NO: 184922 - DNA, 17 bp, Arabidopsis thaliana
tttcaggttttcttcca

SEQ ID NO: 184923 - DNA, 17 bp, Arabidopsis thaliana
tttcagtacgaatacga

SEQ ID NO: 184924 - DNA, 17 bp, Arabidopsis thaliana
tttcagtttagatttca

SEQ ID NO: 184925 - DNA, 17 bp, Arabidopsis thaliana
tttcataacagctacga

SEQ ID NO: 184926 - DNA, 17 bp, Arabidopsis thaliana
tttcataaggttcgtat

SEQ ID NO: 184927 - DNA, 17 bp, Arabidopsis thaliana
tttcatagaaacgtgat

SEQ ID NO: 184928 - DNA, 17 bp, Arabidopsis thaliana
tttcatccttatgagtt

SEQ ID NO: 184929 - DNA, 17 bp, Arabidopsis thaliana
tttcatcgtgatggata

SEQ ID NO: 184930 - DNA, 17 bp, Arabidopsis thaliana
tttcatcgtgatgggga

SEQ ID NO: 184931 - DNA, 17 bp, Arabidopsis thaliana
tttcattcattgtttgt

SEQ ID NO: 184932 - DNA, 17 bp, Arabidopsis thaliana
tttccaagcctctgacc

SEQ ID NO: 184933 - DNA, 17 bp, Arabidopsis thaliana
tttccaaggatgacttg

SEQ ID NO: 184934 - DNA, 17 bp, Arabidopsis thaliana
tttccaagggtcttgca

SEQ ID NO: 184935 - DNA, 17 bp, Arabidopsis thaliana
tttccactaagcagatt

SEQ ID NO: 184936 - DNA, 17 bp, Arabidopsis thaliana
tttccagagattctccc

SEQ ID NO: 184937 - DNA, 17 bp, Arabidopsis thaliana
tttccagctgcaaccaa

SEQ ID NO: 184938 - DNA, 17 bp, Arabidopsis thaliana
tttccaggtaatcggca

SEQ ID NO: 184939 - DNA, 17 bp, Arabidopsis thaliana
tttccatccaattgacg

SEQ ID NO: 184940 - DNA, 17 bp, Arabidopsis thaliana
tttccattgtggactca

SEQ ID NO: 184941 - DNA, 17 bp, Arabidopsis thaliana
tttccattgtggactcg

SEQ ID NO: 184942 - DNA, 17 bp, Arabidopsis thaliana
tttcccaaatgtagaca

SEQ ID NO: 184943 - DNA, 17 bp, Arabidopsis thaliana
tttcccacaaacttgat

SEQ ID NO: 184944 - DNA, 17 bp, Arabidopsis thaliana
tttcccagactttctac

SEQ ID NO: 184945 - DNA, 17 bp, Arabidopsis thaliana
tttccccaggcgtcgaa

SEQ ID NO: 184946 - DNA, 17 bp, Arabidopsis thaliana
tttccccttttgtctcg

SEQ ID NO: 184947 - DNA, 17 bp, Arabidopsis thaliana
tttcccggctggtgcac

SEQ ID NO: 184948 - DNA, 17 bp, Arabidopsis thaliana
tttcccggtaacggagc

SEQ ID NO: 184949 - DNA, 17 bp, Arabidopsis thaliana
tttccctcaggatagca

SEQ ID NO: 184950 - DNA, 17 bp, Arabidopsis thaliana
tttccctcaggatagct

SEQ ID NO: 184951 - DNA, 17 bp, Arabidopsis thaliana
tttccctgtagaaagat

SEQ ID NO: 184952 - DNA, 17 bp, Arabidopsis thaliana
tttccctgtagaaagct

SEQ ID NO: 184953 - DNA, 17 bp, Arabidopsis thaliana
tttccctttctacattg

SEQ ID NO: 184954 - DNA, 17 bp, Arabidopsis thaliana
tttccgataccttttgg

SEQ ID NO: 184955 - DNA, 17 bp, Arabidopsis thaliana
tttccgatatggctcgc

SEQ ID NO: 184956 - DNA, 17 bp, Arabidopsis thaliana
tttccggcaacgtccac

SEQ ID NO: 184957 - DNA, 17 bp, Arabidopsis thaliana
tttcctaaaacaaatag

SEQ ID NO: 184958 - DNA, 17 bp, Arabidopsis thaliana
tttcctcatattggctt

SEQ ID NO: 184959 - DNA, 17 bp, Arabidopsis thaliana
tttcctcgaaacgattc

SEQ ID NO: 184960 - DNA, 17 bp, Arabidopsis thaliana
tttcctctttcaggcag

SEQ ID NO: 184961 - DNA, 17 bp, Arabidopsis thaliana
tttcctctttcagggat

SEQ ID NO: 184962 - DNA, 17 bp, Arabidopsis thaliana
tttccttacaatgtcga

SEQ ID NO: 184963 - DNA, 17 bp, Arabidopsis thaliana
tttcgaattttgtctag

SEQ ID NO: 184964 - DNA, 17 bp, Arabidopsis thaliana
tttcgagcctgttacta

SEQ ID NO: 184965 - DNA, 17 bp, Arabidopsis thaliana
tttcgatagttggtgac

SEQ ID NO: 184966 - DNA, 17 bp, Arabidopsis thaliana
tttcgatgtctagcagt

SEQ ID NO: 184967 - DNA, 17 bp, Arabidopsis thaliana
tttcgcaggcgctattc

SEQ ID NO: 184968 - DNA, 17 bp, Arabidopsis thaliana
tttcgcggtaacaacac

SEQ ID NO: 184969 - DNA, 17 bp, Arabidopsis thaliana
tttcgcgtatcggcatg

SEQ ID NO: 184970 - DNA, 17 bp, Arabidopsis thaliana
tttcggggataagactg

SEQ ID NO: 184971 - DNA, 17 bp, Arabidopsis thaliana
tttcggggtttatcact

SEQ ID NO: 184972 - DNA, 17 bp, Arabidopsis thaliana
tttcgggtcataacgga

SEQ ID NO: 184973 - DNA, 17 bp, Arabidopsis thaliana
tttcgggtcccgacagg

SEQ ID NO: 184974 - DNA, 17 bp, Arabidopsis thaliana
tttcggtgcttcttcac

SEQ ID NO: 184975 - DNA, 17 bp, Arabidopsis thaliana
tttcggtggatggaaag

SEQ ID NO: 184976 - DNA, 17 bp, Arabidopsis thaliana
tttcggtgtctgttcga

SEQ ID NO: 184977 - DNA, 17 bp, Arabidopsis thaliana
tttcggttctctggatt

SEQ ID NO: 184978 - DNA, 17 bp, Arabidopsis thaliana
tttcgtacatcgataga

SEQ ID NO: 184979 - DNA, 17 bp, Arabidopsis thaliana
tttcgtacatcgatagg

SEQ ID NO: 184980 - DNA, 17 bp, Arabidopsis thaliana
tttcgtacttggaccag

SEQ ID NO: 184981 - DNA, 17 bp, Arabidopsis thaliana
tttcgtcgagtgcgcga

SEQ ID NO: 184982 - DNA, 17 bp, Arabidopsis thaliana
tttcgtcgtctgttcga

SEQ ID NO: 184983 - DNA, 17 bp, Arabidopsis thaliana
tttcgtggtgtgaacta

SEQ ID NO: 184984 - DNA, 17 bp, Arabidopsis thaliana
tttcgtggtgtgaactc

SEQ ID NO: 184985 - DNA, 17 bp, Arabidopsis thaliana
tttcgtgttggcgttta

SEQ ID NO: 184986 - DNA, 17 bp, Arabidopsis thaliana
tttcgttatctgttcga

SEQ ID NO: 184987 - DNA, 17 bp, Arabidopsis thaliana
tttcgttcagcggcaga

SEQ ID NO: 184988 - DNA, 17 bp, Arabidopsis thaliana
tttcgttctgttcgacc

SEQ ID NO: 184989 - DNA, 17 bp, Arabidopsis thaliana
tttcgttgcctgttcga

SEQ ID NO: 184990 - DNA, 17 bp, Arabidopsis thaliana
tttcgttgtccgttcga

SEQ ID NO: 184991 - DNA, 17 bp, Arabidopsis thaliana
tttcgttgtctgtccga

SEQ ID NO: 184992 - DNA, 17 bp, Arabidopsis thaliana
tttcgttgtctgttcaa

SEQ ID NO: 184993 - DNA, 17 bp, Arabidopsis thaliana
tttcgttgtctgttcga

SEQ ID NO: 184994 - DNA, 17 bp, Arabidopsis thaliana
tttcgttgtctgttcgg

SEQ ID NO: 184995 - DNA, 17 bp, Arabidopsis thaliana
tttcgttgtctgtttga

SEQ ID NO: 184996 - DNA, 17 bp, Arabidopsis thaliana
tttcgttgtctgtttgt

SEQ ID NO: 184997 - DNA, 17 bp, Arabidopsis thaliana
tttcgttgttgttcgac

SEQ ID NO: 184998 - DNA, 17 bp, Arabidopsis thaliana
tttcgttttctgttcga

SEQ ID NO: 184999 - DNA, 17 bp, Arabidopsis thaliana
tttcgttttctgtttga

SEQ ID NO: 185000 - DNA, 17 bp, Arabidopsis thaliana
tttctaaaccgaccgag

SEQ ID NO: 185001 - DNA, 17 bp, Arabidopsis thaliana
tttctaaacctaccgag

SEQ ID NO: 185002 - DNA, 17 bp, Arabidopsis thaliana
tttctaagctaagaaaa

SEQ ID NO: 185003 - DNA, 17 bp, Arabidopsis thaliana
tttctaaggagacaggc

SEQ ID NO: 185004 - DNA, 17 bp, Arabidopsis thaliana
tttctaattttcagctc

SEQ ID NO: 185005 - DNA, 17 bp, Arabidopsis thaliana
tttctaccatccgatca

SEQ ID NO: 185006 - DNA, 17 bp, Arabidopsis thaliana
tttctaccatctggaaa

SEQ ID NO: 185007 - DNA, 17 bp, Arabidopsis thaliana
tttctaccatctggaat

SEQ ID NO: 185008 - DNA, 17 bp, Arabidopsis thaliana
tttctaccgagacgttt

SEQ ID NO: 185009 - DNA, 17 bp, Arabidopsis thaliana
tttctactaaatcagaa

SEQ ID NO: 185010 - DNA, 17 bp, Arabidopsis thaliana
tttctactatcctgggc

SEQ ID NO: 185011 - DNA, 17 bp, Arabidopsis thaliana
tttctacttaatgaaca

SEQ ID NO: 185012 - DNA, 17 bp, Arabidopsis thaliana
tttctactttttctact

SEQ ID NO: 185013 - DNA, 17 bp, Arabidopsis thaliana
tttctagacgttgacaa

SEQ ID NO: 185014 - DNA, 17 bp, Arabidopsis thaliana
tttctagcggtggagcc

SEQ ID NO: 185015 - DNA, 17 bp, Arabidopsis thaliana
tttctagggatttttcg

SEQ ID NO: 185016 - DNA, 17 bp, Arabidopsis thaliana
tttctatgcaacaaacc

SEQ ID NO: 185017 - DNA, 17 bp, Arabidopsis thaliana
tttctatggggcgtagt

SEQ ID NO: 185018 - DNA, 17 bp, Arabidopsis thaliana
tttctcaattctgtcga

SEQ ID NO: 185019 - DNA, 17 bp, Arabidopsis thaliana
tttctcaattctgttga

SEQ ID NO: 185020 - DNA, 17 bp, Arabidopsis thaliana
tttctcacctgtgcaaa

SEQ ID NO: 185021 - DNA, 17 bp, Arabidopsis thaliana
tttctccaccattttca

SEQ ID NO: 185022 - DNA, 17 bp, Arabidopsis thaliana
tttctcccatccgatca

SEQ ID NO: 185023 - DNA, 17 bp, Arabidopsis thaliana
tttctcccggcaggcgt

SEQ ID NO: 185024 - DNA, 17 bp, Arabidopsis thaliana
tttctcggaaatggata

SEQ ID NO: 185025 - DNA, 17 bp, Arabidopsis thaliana
tttctcggaacgccccc

SEQ ID NO: 185026 - DNA, 17 bp, Arabidopsis thaliana
tttctcggccttttggc

SEQ ID NO: 185027 - DNA, 17 bp, Arabidopsis thaliana
tttctcgtgaatatctg

SEQ ID NO: 185028 - DNA, 17 bp, Arabidopsis thaliana
tttctcgttttacagat

SEQ ID NO: 185029 - DNA, 17 bp, Arabidopsis thaliana
tttctctacgctatgtt

SEQ ID NO: 185030 - DNA, 17 bp, Arabidopsis thaliana
tttctctactcttttct

SEQ ID NO: 185031 - DNA, 17 bp, Arabidopsis thaliana
tttctctacttacgacg

SEQ ID NO: 185032 - DNA, 17 bp, Arabidopsis thaliana
tttctctcatgtttctc

SEQ ID NO: 185033 - DNA, 17 bp, Arabidopsis thaliana
tttctgagcaaccccat

SEQ ID NO: 185034 - DNA, 17 bp, Arabidopsis thaliana
tttctgcaaacgccttg

SEQ ID NO: 185035 - DNA, 17 bp, Arabidopsis thaliana
tttctgcccagtgctct

SEQ ID NO: 185036 - DNA, 17 bp, Arabidopsis thaliana
tttctgcgggaagcatt

SEQ ID NO: 185037 - DNA, 17 bp, Arabidopsis thaliana
tttctggagaccaaacc

SEQ ID NO: 185038 - DNA, 17 bp, Arabidopsis thaliana
tttctggagaccaacca

SEQ ID NO: 185039 - DNA, 17 bp, Arabidopsis thaliana
tttctgttggatcatga

SEQ ID NO: 185040 - DNA, 17 bp, Arabidopsis thaliana
tttcttaaatgaccgct

SEQ ID NO: 185041 - DNA, 17 bp, Arabidopsis thaliana
tttcttaatgttcgaat

SEQ ID NO: 185042 - DNA, 17 bp, Arabidopsis thaliana
tttcttagagggacaat

SEQ ID NO: 185043 - DNA, 17 bp, Arabidopsis thaliana
tttcttcagcctcggag

SEQ ID NO: 185044 - DNA, 17 bp, Arabidopsis thaliana
tttcttcagttgtattt

SEQ ID NO: 185045 - DNA, 17 bp, Arabidopsis thaliana
tttcttcgccaaaacct

SEQ ID NO: 185046 - DNA, 17 bp, Arabidopsis thaliana
tttcttcgtgaataaat

SEQ ID NO: 185047 - DNA, 17 bp, Arabidopsis thaliana
tttcttcgtgaatatct

SEQ ID NO: 185048 - DNA, 17 bp, Arabidopsis thaliana
tttcttcttagccgagt

SEQ ID NO: 185049 - DNA, 17 bp, Arabidopsis thaliana
tttcttcttagcggctt

SEQ ID NO: 185050 - DNA, 17 bp, Arabidopsis thaliana
tttcttcttggataaag

SEQ ID NO: 185051 - DNA, 17 bp, Arabidopsis thaliana
tttcttgaccctgtaag

SEQ ID NO: 185052 - DNA, 17 bp, Arabidopsis thaliana
tttcttgaccttgcaag

SEQ ID NO: 185053 - DNA, 17 bp, Arabidopsis thaliana
tttcttgaccttgtaag

SEQ ID NO: 185054 - DNA, 17 bp, Arabidopsis thaliana
tttcttgattctatggg

SEQ ID NO: 185055 - DNA, 17 bp, Arabidopsis thaliana
tttcttgcaaggttcaa

SEQ ID NO: 185056 - DNA, 17 bp, Arabidopsis thaliana
tttcttttcaggcttga

SEQ ID NO: 185057 - DNA, 17 bp, Arabidopsis thaliana
tttcttttgacatccgg

SEQ ID NO: 185058 - DNA, 17 bp, Arabidopsis thaliana
tttctttttgacatccg

SEQ ID NO: 185059 - DNA, 17 bp, Arabidopsis thaliana
tttgaaaagtatccaac

SEQ ID NO: 185060 - DNA, 17 bp, Arabidopsis thaliana
tttgaaaatcgacagcc

SEQ ID NO: 185061 - DNA, 17 bp, Arabidopsis thaliana
tttgaaacaccatcaca

SEQ ID NO: 185062 - DNA, 17 bp, Arabidopsis thaliana
tttgaaacaccatcacg

SEQ ID NO: 185063 - DNA, 17 bp, Arabidopsis thaliana
tttgaaatgattgtgca

SEQ ID NO: 185064 - DNA, 17 bp, Arabidopsis thaliana
tttgaaatttcatcgtg

SEQ ID NO: 185065 - DNA, 17 bp, Arabidopsis thaliana
tttgaaccttttgattt

SEQ ID NO: 185066 - DNA, 17 bp, Arabidopsis thaliana
tttgaacgcaagttgcg

SEQ ID NO: 185067 - DNA, 17 bp, Arabidopsis thaliana
tttgaactatctggtgt

SEQ ID NO: 185068 - DNA, 17 bp, Arabidopsis thaliana
tttgaactctgtcctgt

SEQ ID NO: 185069 - DNA, 17 bp, Arabidopsis thaliana
tttgaacttgtgtatta

SEQ ID NO: 185070 - DNA, 17 bp, Arabidopsis thaliana
tttgaacttgtgtattt

SEQ ID NO: 185071 - DNA, 17 bp, Arabidopsis thaliana
tttgaagctagaggtgt

SEQ ID NO: 185072 - DNA, 17 bp, Arabidopsis thaliana
tttgaatcttagcgaca

SEQ ID NO: 185073 - DNA, 17 bp, Arabidopsis thaliana
tttgaatggtaatgatt

SEQ ID NO: 185074 - DNA, 17 bp, Arabidopsis thaliana
tttgagacaaatcatta

SEQ ID NO: 185075 - DNA, 17 bp, Arabidopsis thaliana
tttgagacgggcaagct

SEQ ID NO: 185076 - DNA, 17 bp, Arabidopsis thaliana
tttgagactcgaactgg

SEQ ID NO: 185077 - DNA, 17 bp, Arabidopsis thaliana
tttgagagatcaagttt

SEQ ID NO: 185078 - DNA, 17 bp, Arabidopsis thaliana
tttgagatctgcgacat

SEQ ID NO: 185079 - DNA, 17 bp, Arabidopsis thaliana
tttgagcgagatcttgg

SEQ ID NO: 185080 - DNA, 17 bp, Arabidopsis thaliana
tttgagtgatttcttga

SEQ ID NO: 185081 - DNA, 17 bp, Arabidopsis thaliana
tttgataacatggacat

SEQ ID NO: 185082 - DNA, 17 bp, Arabidopsis thaliana
tttgataccctggtagt

SEQ ID NO: 185083 - DNA, 17 bp, Arabidopsis thaliana
tttgatcatatcagtgg

SEQ ID NO: 185084 - DNA, 17 bp, Arabidopsis thaliana
tttgatcattctccatg

SEQ ID NO: 185085 - DNA, 17 bp, Arabidopsis thaliana
tttgatccttcgatgtc

SEQ ID NO: 185086 - DNA, 17 bp, Arabidopsis thaliana
tttgatcgttgcttgac

SEQ ID NO: 185087 - DNA, 17 bp, Arabidopsis thaliana
tttgatcttgaggtaga

SEQ ID NO: 185088 - DNA, 17 bp, Arabidopsis thaliana
tttgatgctacgaatat

SEQ ID NO: 185089 - DNA, 17 bp, Arabidopsis thaliana
tttgattgaagggagct

SEQ ID NO: 185090 - DNA, 17 bp, Arabidopsis thaliana
tttgattttacggtata

SEQ ID NO: 185091 - DNA, 17 bp, Arabidopsis thaliana
tttgattttactgtata

SEQ ID NO: 185092 - DNA, 17 bp, Arabidopsis thaliana
tttgattttcggcatga

SEQ ID NO: 185093 - DNA, 17 bp, Arabidopsis thaliana
tttgcaacggtggatca

SEQ ID NO: 185094 - DNA, 17 bp, Arabidopsis thaliana
tttgcaataacgctgta

SEQ ID NO: 185095 - DNA, 17 bp, Arabidopsis thaliana
tttgcacaggtgagaaa

SEQ ID NO: 185096 - DNA, 17 bp, Arabidopsis thaliana
tttgcagagactatcta

SEQ ID NO: 185097 - DNA, 17 bp, Arabidopsis thaliana
tttgcagcgttcggtta

SEQ ID NO: 185098 - DNA, 17 bp, Arabidopsis thaliana
tttgcaggggatcaact

SEQ ID NO: 185099 - DNA, 17 bp, Arabidopsis thaliana
tttgcaggttcgtgacc

SEQ ID NO: 185100 - DNA, 17 bp, Arabidopsis thaliana
tttgcagtttcgtaaaa

SEQ ID NO: 185101 - DNA, 17 bp, Arabidopsis thaliana
tttgcatggcgaggatg

SEQ ID NO: 185102 - DNA, 17 bp, Arabidopsis thaliana
tttgccaaggatgtttt

SEQ ID NO: 185103 - DNA, 17 bp, Arabidopsis thaliana
tttgccagtccaggaca

SEQ ID NO: 185104 - DNA, 17 bp, Arabidopsis thaliana
tttgcgagatttactgt

SEQ ID NO: 185105 - DNA, 17 bp, Arabidopsis thaliana
tttgcggattcgattat

SEQ ID NO: 185106 - DNA, 17 bp, Arabidopsis thaliana
tttgcggttgacaggag

SEQ ID NO: 185107 - DNA, 17 bp, Arabidopsis thaliana
tttgctaagtttggatg

SEQ ID NO: 185108 - DNA, 17 bp, Arabidopsis thaliana
tttgctgatgcgggacg

SEQ ID NO: 185109 - DNA, 17 bp, Arabidopsis thaliana
tttgctgcaactcttgc

SEQ ID NO: 185110 - DNA, 17 bp, Arabidopsis thaliana
tttgcttccagctttta

SEQ ID NO: 185111 - DNA, 17 bp, Arabidopsis thaliana
tttgcttccagcttttg

SEQ ID NO: 185112 - DNA, 17 bp, Arabidopsis thaliana
tttgcttcgcaggagag

SEQ ID NO: 185113 - DNA, 17 bp, Arabidopsis thaliana
tttgcttctagcttttg

SEQ ID NO: 185114 - DNA, 17 bp, Arabidopsis thaliana
tttgcttgcagagagaa

SEQ ID NO: 185115 - DNA, 17 bp, Arabidopsis thaliana
tttggaaccccgcatct

SEQ ID NO: 185116 - DNA, 17 bp, Arabidopsis thaliana
tttggaagcgactcgcg

SEQ ID NO: 185117 - DNA, 17 bp, Arabidopsis thaliana
tttggaattgcggttgt

SEQ ID NO: 185118 - DNA, 17 bp, Arabidopsis thaliana
tttggaattttcgtgtt

SEQ ID NO: 185119 - DNA, 17 bp, Arabidopsis thaliana
tttggacaagattctga

SEQ ID NO: 185120 - DNA, 17 bp, Arabidopsis thaliana
tttggacaggtatcgac

SEQ ID NO: 185121 - DNA, 17 bp, Arabidopsis thaliana
tttggaccaggcttcat

SEQ ID NO: 185122 - DNA, 17 bp, Arabidopsis thaliana
tttggactgaagggagc

SEQ ID NO: 185123 - DNA, 17 bp, Arabidopsis thaliana
tttggactgaagggagg

SEQ ID NO: 185124 - DNA, 17 bp, Arabidopsis thaliana
tttggactttttggtca

SEQ ID NO: 185125 - DNA, 17 bp, Arabidopsis thaliana
tttggagagcaatgatg

SEQ ID NO: 185126 - DNA, 17 bp, Arabidopsis thaliana
tttggagcattgcgaca

SEQ ID NO: 185127 - DNA, 17 bp, Arabidopsis thaliana
tttggagctgtggaaga

SEQ ID NO: 185128 - DNA, 17 bp, Arabidopsis thaliana
tttggagggatctcact

SEQ ID NO: 185129 - DNA, 17 bp, Arabidopsis thaliana
tttggagtctagcagtg

SEQ ID NO: 185130 - DNA, 17 bp, Arabidopsis thaliana
tttggagttcaacatat

SEQ ID NO: 185131 - DNA, 17 bp, Arabidopsis thaliana
tttggatcatttcggct

SEQ ID NO: 185132 - DNA, 17 bp, Arabidopsis thaliana
tttggatccgatcgtga

SEQ ID NO: 185133 - DNA, 17 bp, Arabidopsis thaliana
tttggatcgaagggagc

SEQ ID NO: 185134 - DNA, 17 bp, Arabidopsis thaliana
tttggatgatcttgacg

SEQ ID NO: 185135 - DNA, 17 bp, Arabidopsis thaliana
tttggatgctgctcaac

SEQ ID NO: 185136 - DNA, 17 bp, Arabidopsis thaliana
tttggatgctgctcagc

SEQ ID NO: 185137 - DNA, 17 bp, Arabidopsis thaliana
tttggattagagggaga

SEQ ID NO: 185138 - DNA, 17 bp, Arabidopsis thaliana
tttggattcgtggatca

SEQ ID NO: 185139 - DNA, 17 bp, Arabidopsis thaliana
tttggattcttgatgag

SEQ ID NO: 185140 - DNA, 17 bp, Arabidopsis thaliana
tttggattgaacggagc

SEQ ID NO: 185141 - DNA, 17 bp, Arabidopsis thaliana
tttggattgaatggagc

SEQ ID NO: 185142 - DNA, 17 bp, Arabidopsis thaliana
tttggattgagggagct

SEQ ID NO: 185143 - DNA, 17 bp, Arabidopsis thaliana
tttggattgaggggagc

SEQ ID NO: 185144 - DNA, 17 bp, Arabidopsis thaliana
tttggattgatggagct

SEQ ID NO: 185145 - DNA, 17 bp, Arabidopsis thaliana
tttggcattctgtccac

SEQ ID NO: 185146 - DNA, 17 bp, Arabidopsis thaliana
tttggccccaaggctcg

SEQ ID NO: 185147 - DNA, 17 bp, Arabidopsis thaliana
tttggcctggtctgcag

SEQ ID NO: 185148 - DNA, 17 bp, Arabidopsis thaliana
tttggcgctaagattcg

SEQ ID NO: 185149 - DNA, 17 bp, Arabidopsis thaliana
tttggcgtcgctcagaa

SEQ ID NO: 185150 - DNA, 17 bp, Arabidopsis thaliana
tttggctccaaatcgcg

SEQ ID NO: 185151 - DNA, 17 bp, Arabidopsis thaliana
tttggctgaaacgtgaa

SEQ ID NO: 185152 - DNA, 17 bp, Arabidopsis thaliana
tttgggactcaagaaga

SEQ ID NO: 185153 - DNA, 17 bp, Arabidopsis thaliana
tttgggagtagccatat

SEQ ID NO: 185154 - DNA, 17 bp, Arabidopsis thaliana
tttgggatcatactgac

SEQ ID NO: 185155 - DNA, 17 bp, Arabidopsis thaliana
tttgggatcgtactgac

SEQ ID NO: 185156 - DNA, 17 bp, Arabidopsis thaliana
tttgggatgtgctaaaa

SEQ ID NO: 185157 - DNA, 17 bp, Arabidopsis thaliana
tttgggccgatctatct

SEQ ID NO: 185158 - DNA, 17 bp, Arabidopsis thaliana
tttggggacgagatgtt

SEQ ID NO: 185159 - DNA, 17 bp, Arabidopsis thaliana
tttggggattttgtttt

SEQ ID NO: 185160 - DNA, 17 bp, Arabidopsis thaliana
tttgggtcgatctcaga

SEQ ID NO: 185161 - DNA, 17 bp, Arabidopsis thaliana
tttgggtgcgattttgg

SEQ ID NO: 185162 - DNA, 17 bp, Arabidopsis thaliana
tttgggtttatgatcgc

SEQ ID NO: 185163 - DNA, 17 bp, Arabidopsis thaliana
tttggtaatcagtaacg

SEQ ID NO: 185164 - DNA, 17 bp, Arabidopsis thaliana
tttggtcccaaggctcg

SEQ ID NO: 185165 - DNA, 17 bp, Arabidopsis thaliana
tttggtcgccatgtttt

SEQ ID NO: 185166 - DNA, 17 bp, Arabidopsis thaliana
tttggtcggcttgtccc

SEQ ID NO: 185167 - DNA, 17 bp, Arabidopsis thaliana
tttggtctacagattag

SEQ ID NO: 185168 - DNA, 17 bp, Arabidopsis thaliana
tttggtcttcagaaagt

SEQ ID NO: 185169 - DNA, 17 bp, Arabidopsis thaliana
tttggttaaggatctgt

SEQ ID NO: 185170 - DNA, 17 bp, Arabidopsis thaliana
tttggttacagagggcc

SEQ ID NO: 185171 - DNA, 17 bp, Arabidopsis thaliana
tttggtttagtcacttt

SEQ ID NO: 185172 - DNA, 17 bp, Arabidopsis thaliana
tttggtttgttcaaaga

SEQ ID NO: 185173 - DNA, 17 bp, Arabidopsis thaliana
tttgtaattacggaaga

SEQ ID NO: 185174 - DNA, 17 bp, Arabidopsis thaliana
tttgtaatttcaaaatt

SEQ ID NO: 185175 - DNA, 17 bp, Arabidopsis thaliana
tttgtacacaccgcccg

SEQ ID NO: 185176 - DNA, 17 bp, Arabidopsis thaliana
tttgtagacgttgacaa

SEQ ID NO: 185177 - DNA, 17 bp, Arabidopsis thaliana
tttgtagagaaacatga

SEQ ID NO: 185178 - DNA, 17 bp, Arabidopsis thaliana
tttgtagtcgaccaact

SEQ ID NO: 185179 - DNA, 17 bp, Arabidopsis thaliana
tttgtatttgcaaagac

SEQ ID NO: 185180 - DNA, 17 bp, Arabidopsis thaliana
tttgtcactaagattcg

SEQ ID NO: 185181 - DNA, 17 bp, Arabidopsis thaliana
tttgtcgaatcatcaag

SEQ ID NO: 185182 - DNA, 17 bp, Arabidopsis thaliana
tttgtcgctaagataga

SEQ ID NO: 185183 - DNA, 17 bp, Arabidopsis thaliana
tttgtcgctaagattca

SEQ ID NO: 185184 - DNA, 17 bp, Arabidopsis thaliana
tttgtcgctaagattcg

SEQ ID NO: 185185 - DNA, 17 bp, Arabidopsis thaliana
tttgtcggaaaattcag

SEQ ID NO: 185186 - DNA, 17 bp, Arabidopsis thaliana
tttgtcgtagtctagct

SEQ ID NO: 185187 - DNA, 17 bp, Arabidopsis thaliana
tttgtctacaattttgg

SEQ ID NO: 185188 - DNA, 17 bp, Arabidopsis thaliana
tttgtctacatttggga

SEQ ID NO: 185189 - DNA, 17 bp, Arabidopsis thaliana
tttgtctgaaccatttt

SEQ ID NO: 185190 - DNA, 17 bp, Arabidopsis thaliana
tttgtctgatttttttt

SEQ ID NO: 185191 - DNA, 17 bp, Arabidopsis thaliana
tttgtctggatctttga

SEQ ID NO: 185192 - DNA, 17 bp, Arabidopsis thaliana
tttgtgaaatgacttga

SEQ ID NO: 185193 - DNA, 17 bp, Arabidopsis thaliana
tttgtgcccagacgaga

SEQ ID NO: 185194 - DNA, 17 bp, Arabidopsis thaliana
tttgtggactatgaatg

SEQ ID NO: 185195 - DNA, 17 bp, Arabidopsis thaliana
tttgtggattcgattat

SEQ ID NO: 185196 - DNA, 17 bp, Arabidopsis thaliana
tttgttactggagaacg

SEQ ID NO: 185197 - DNA, 17 bp, Arabidopsis thaliana
tttgttactggagaact

SEQ ID NO: 185198 - DNA, 17 bp, Arabidopsis thaliana
tttgttatccatttatt

SEQ ID NO: 185199 - DNA, 17 bp, Arabidopsis thaliana
tttgttatccatttcag

SEQ ID NO: 185200 - DNA, 17 bp, Arabidopsis thaliana
tttgttatttggatgct

SEQ ID NO: 185201 - DNA, 17 bp, Arabidopsis thaliana
tttgttcaaagacattt

SEQ ID NO: 185202 - DNA, 17 bp, Arabidopsis thaliana
tttgttccttcttctgt

SEQ ID NO: 185203 - DNA, 17 bp, Arabidopsis thaliana
tttgttgattgatatct

SEQ ID NO: 185204 - DNA, 17 bp, Arabidopsis thaliana
tttgttgtactcggttt

SEQ ID NO: 185205 - DNA, 17 bp, Arabidopsis thaliana
tttgttgtctgttcgac

SEQ ID NO: 185206 - DNA, 17 bp, Arabidopsis thaliana
tttgtttaccagtttgt

SEQ ID NO: 185207 - DNA, 17 bp, Arabidopsis thaliana
tttgtttccaggagcat

SEQ ID NO: 185208 - DNA, 17 bp, Arabidopsis thaliana
tttgtttcgggtcataa

SEQ ID NO: 185209 - DNA, 17 bp, Arabidopsis thaliana
tttgttttaggaaagca

SEQ ID NO: 185210 - DNA, 17 bp, Arabidopsis thaliana
tttgttttaggaaagct

SEQ ID NO: 185211 - DNA, 17 bp, Arabidopsis thaliana
tttgttttcggggttta

SEQ ID NO: 185212 - DNA, 17 bp, Arabidopsis thaliana
tttgttttttccgtttg

SEQ ID NO: 185213 - DNA, 17 bp, Arabidopsis thaliana
ttttaagtccaacataa

SEQ ID NO: 185214 - DNA, 17 bp, Arabidopsis thaliana
ttttaagtctaacatag

SEQ ID NO: 185215 - DNA, 17 bp, Arabidopsis thaliana
ttttaatattcaaggaa

SEQ ID NO: 185216 - DNA, 17 bp, Arabidopsis thaliana
ttttacaaaggattcga

SEQ ID NO: 185217 - DNA, 17 bp, Arabidopsis thaliana
ttttacaaggtgttgtg

SEQ ID NO: 185218 - DNA, 17 bp, Arabidopsis thaliana
ttttacagattctattc

SEQ ID NO: 185219 - DNA, 17 bp, Arabidopsis thaliana
ttttaccctactgatgc

SEQ ID NO: 185220 - DNA, 17 bp, Arabidopsis thaliana
ttttacgctatgttgga

SEQ ID NO: 185221 - DNA, 17 bp, Arabidopsis thaliana
ttttacgttgggcaact

SEQ ID NO: 185222 - DNA, 17 bp, Arabidopsis thaliana
ttttactgctacttgtg

SEQ ID NO: 185223 - DNA, 17 bp, Arabidopsis thaliana
ttttagacgacttgaaa

SEQ ID NO: 185224 - DNA, 17 bp, Arabidopsis thaliana
ttttagatctcttatat

SEQ ID NO: 185225 - DNA, 17 bp, Arabidopsis thaliana
ttttaggtccaagccca

SEQ ID NO: 185226 - DNA, 17 bp, Arabidopsis thaliana
ttttagtcgcatcctgt

SEQ ID NO: 185227 - DNA, 17 bp, Arabidopsis thaliana
ttttagtgttccgatgg

SEQ ID NO: 185228 - DNA, 17 bp, Arabidopsis thaliana
ttttatgatgagtttat

SEQ ID NO: 185229 - DNA, 17 bp, Arabidopsis thaliana
ttttattgaagggagct

SEQ ID NO: 185230 - DNA, 17 bp, Arabidopsis thaliana
ttttattgtctaggtaa

SEQ ID NO: 185231 - DNA, 17 bp, Arabidopsis thaliana
ttttattgtttactgaa

SEQ ID NO: 185232 - DNA, 17 bp, Arabidopsis thaliana
ttttattttgcgtaagg

SEQ ID NO: 185233 - DNA, 17 bp, Arabidopsis thaliana
ttttattttgtctcgtt

SEQ ID NO: 185234 - DNA, 17 bp, Arabidopsis thaliana
ttttcaaaactggtccg

SEQ ID NO: 185235 - DNA, 17 bp, Arabidopsis thaliana
ttttcaaaactggttcg

SEQ ID NO: 185236 - DNA, 17 bp, Arabidopsis thaliana
ttttcaaatccatttct

SEQ ID NO: 185237 - DNA, 17 bp, Arabidopsis thaliana
ttttcaaccaagcgcca

SEQ ID NO: 185238 - DNA, 17 bp, Arabidopsis thaliana
ttttcaagtcgtctaaa

SEQ ID NO: 185239 - DNA, 17 bp, Arabidopsis thaliana
ttttcacttgacaatta

SEQ ID NO: 185240 - DNA, 17 bp, Arabidopsis thaliana
ttttcagatccatttct

SEQ ID NO: 185241 - DNA, 17 bp, Arabidopsis thaliana
ttttcagctcaatatat

SEQ ID NO: 185242 - DNA, 17 bp, Arabidopsis thaliana
ttttcagtacgaataca

SEQ ID NO: 185243 - DNA, 17 bp, Arabidopsis thaliana
ttttcagtacgaatacg

SEQ ID NO: 185244 - DNA, 17 bp, Arabidopsis thaliana
ttttcagtatgagcggg

SEQ ID NO: 185245 - DNA, 17 bp, Arabidopsis thaliana
ttttcatcagcaaagga

SEQ ID NO: 185246 - DNA, 17 bp, Arabidopsis thaliana
ttttcattcattgtttg

SEQ ID NO: 185247 - DNA, 17 bp, Arabidopsis thaliana
ttttcatttttagcatt

SEQ ID NO: 185248 - DNA, 17 bp, Arabidopsis thaliana
ttttccaattatgtctt

SEQ ID NO: 185249 - DNA, 17 bp, Arabidopsis thaliana
ttttcccacaaacttaa

SEQ ID NO: 185250 - DNA, 17 bp, Arabidopsis thaliana
ttttcccacaaacttga

SEQ ID NO: 185251 - DNA, 17 bp, Arabidopsis thaliana
ttttccctgtagaaaga

SEQ ID NO: 185252 - DNA, 17 bp, Arabidopsis thaliana
ttttccgccgtcgggat

SEQ ID NO: 185253 - DNA, 17 bp, Arabidopsis thaliana
ttttcctactccgccca

SEQ ID NO: 185254 - DNA, 17 bp, Arabidopsis thaliana
ttttcctagaacgtggt

SEQ ID NO: 185255 - DNA, 17 bp, Arabidopsis thaliana
ttttcctcgtaggcgcg

SEQ ID NO: 185256 - DNA, 17 bp, Arabidopsis thaliana
ttttcctctcaagcata

SEQ ID NO: 185257 - DNA, 17 bp, Arabidopsis thaliana
ttttccttcttggaggg

SEQ ID NO: 185258 - DNA, 17 bp, Arabidopsis thaliana
ttttcgaacgatgtcct

SEQ ID NO: 185259 - DNA, 17 bp, Arabidopsis thaliana
ttttcgacggcattacg

SEQ ID NO: 185260 - DNA, 17 bp, Arabidopsis thaliana
ttttcgatgtctatcag

SEQ ID NO: 185261 - DNA, 17 bp, Arabidopsis thaliana
ttttcgatgtttagcag

SEQ ID NO: 185262 - DNA, 17 bp, Arabidopsis thaliana
ttttcgcagcaatgtcg

SEQ ID NO: 185263 - DNA, 17 bp, Arabidopsis thaliana
ttttcgggtcgctttct

SEQ ID NO: 185264 - DNA, 17 bp, Arabidopsis thaliana
ttttcgtctgttatcta

SEQ ID NO: 185265 - DNA, 17 bp, Arabidopsis thaliana
ttttcgtgatttctctc

SEQ ID NO: 185266 - DNA, 17 bp, Arabidopsis thaliana
ttttcgtgttggttcag

SEQ ID NO: 185267 - DNA, 17 bp, Arabidopsis thaliana
ttttctaattttcagct

SEQ ID NO: 185268 - DNA, 17 bp, Arabidopsis thaliana
ttttctacgtaggttcg

SEQ ID NO: 185269 - DNA, 17 bp, Arabidopsis thaliana
ttttctactatcctgct

SEQ ID NO: 185270 - DNA, 17 bp, Arabidopsis thaliana
ttttctactatcctggg

SEQ ID NO: 185271 - DNA, 17 bp, Arabidopsis thaliana
ttttctactatcttgct

SEQ ID NO: 185272 - DNA, 17 bp, Arabidopsis thaliana
ttttctactttttctac

SEQ ID NO: 185273 - DNA, 17 bp, Arabidopsis thaliana
ttttctagtttcgccat

SEQ ID NO: 185274 - DNA, 17 bp, Arabidopsis thaliana
ttttctataacgtatct

SEQ ID NO: 185275 - DNA, 17 bp, Arabidopsis thaliana
ttttctccacaaatcga

SEQ ID NO: 185276 - DNA, 17 bp, Arabidopsis thaliana
ttttctcctaccttgtc

SEQ ID NO: 185277 - DNA, 17 bp, Arabidopsis thaliana
ttttctcgttttacaga

SEQ ID NO: 185278 - DNA, 17 bp, Arabidopsis thaliana
ttttctgcataccctcg

SEQ ID NO: 185279 - DNA, 17 bp, Arabidopsis thaliana
ttttctgcatatcctcg

SEQ ID NO: 185280 - DNA, 17 bp, Arabidopsis thaliana
ttttcttctacttctcg

SEQ ID NO: 185281 - DNA, 17 bp, Arabidopsis thaliana
ttttcttctacttctta

SEQ ID NO: 185282 - DNA, 17 bp, Arabidopsis thaliana
ttttcttctacttcttg

SEQ ID NO: 185283 - DNA, 17 bp, Arabidopsis thaliana
ttttcttctacttcttt

SEQ ID NO: 185284 - DNA, 17 bp, Arabidopsis thaliana
ttttcttctcaagcata

SEQ ID NO: 185285 - DNA, 17 bp, Arabidopsis thaliana
ttttcttgaccttgtaa

SEQ ID NO: 185286 - DNA, 17 bp, Arabidopsis thaliana
ttttcttgaccttgtta

SEQ ID NO: 185287 - DNA, 17 bp, Arabidopsis thaliana
ttttcttgaccttgttt

SEQ ID NO: 185288 - DNA, 17 bp, Arabidopsis thaliana
ttttcttgattttgtaa

SEQ ID NO: 185289 - DNA, 17 bp, Arabidopsis thaliana
ttttcttttgacatccg

SEQ ID NO: 185290 - DNA, 17 bp, Arabidopsis thaliana
ttttgaaaagtatccaa

SEQ ID NO: 185291 - DNA, 17 bp, Arabidopsis thaliana
ttttgaaattcataagt

SEQ ID NO: 185292 - DNA, 17 bp, Arabidopsis thaliana
ttttgaagaaatcgtca

SEQ ID NO: 185293 - DNA, 17 bp, Arabidopsis thaliana
ttttgacttcgttagga

SEQ ID NO: 185294 - DNA, 17 bp, Arabidopsis thaliana
ttttgagacaaatcatt

SEQ ID NO: 185295 - DNA, 17 bp, Arabidopsis thaliana
ttttgagagatcaagtt

SEQ ID NO: 185296 - DNA, 17 bp, Arabidopsis thaliana
ttttgatcatcccgtcg

SEQ ID NO: 185297 - DNA, 17 bp, Arabidopsis thaliana
ttttgatcatctcgtcg

SEQ ID NO: 185298 - DNA, 17 bp, Arabidopsis thaliana
ttttgatccttcgatgt

SEQ ID NO: 185299 - DNA, 17 bp, Arabidopsis thaliana
ttttgatctggttcggg

SEQ ID NO: 185300 - DNA, 17 bp, Arabidopsis thaliana
ttttgattttgcggtga

SEQ ID NO: 185301 - DNA, 17 bp, Arabidopsis thaliana
ttttgcagcgaccgccg

SEQ ID NO: 185302 - DNA, 17 bp, Arabidopsis thaliana
ttttgcgaatgtatgaa

SEQ ID NO: 185303 - DNA, 17 bp, Arabidopsis thaliana
ttttggaattttcgtgt

SEQ ID NO: 185304 - DNA, 17 bp, Arabidopsis thaliana
ttttggacaggtatcga

SEQ ID NO: 185305 - DNA, 17 bp, Arabidopsis thaliana
ttttggacggtagacga

SEQ ID NO: 185306 - DNA, 17 bp, Arabidopsis thaliana
ttttggactgaaggtcg

SEQ ID NO: 185307 - DNA, 17 bp, Arabidopsis thaliana
ttttggactttttggtc

SEQ ID NO: 185308 - DNA, 17 bp, Arabidopsis thaliana
ttttggatattttcgat

SEQ ID NO: 185309 - DNA, 17 bp, Arabidopsis thaliana
ttttggcgctgtagatt

SEQ ID NO: 185310 - DNA, 17 bp, Arabidopsis thaliana
ttttgggatcaaggtta

SEQ ID NO: 185311 - DNA, 17 bp, Arabidopsis thaliana
ttttgggatcatactga

SEQ ID NO: 185312 - DNA, 17 bp, Arabidopsis thaliana
ttttgggcggaaccgat

SEQ ID NO: 185313 - DNA, 17 bp, Arabidopsis thaliana
ttttggtcaatactttt

SEQ ID NO: 185314 - DNA, 17 bp, Arabidopsis thaliana
ttttggtcccaaggctc

SEQ ID NO: 185315 - DNA, 17 bp, Arabidopsis thaliana
ttttggttacacggaaa

SEQ ID NO: 185316 - DNA, 17 bp, Arabidopsis thaliana
ttttggtttcgcctttt

SEQ ID NO: 185317 - DNA, 17 bp, Arabidopsis thaliana
ttttgtaaactgaagga

SEQ ID NO: 185318 - DNA, 17 bp, Arabidopsis thaliana
ttttgtaaactgaaggt

SEQ ID NO: 185319 - DNA, 17 bp, Arabidopsis thaliana
ttttgtaatttcaaaat

SEQ ID NO: 185320 - DNA, 17 bp, Arabidopsis thaliana
ttttgtagacgttgaca

SEQ ID NO: 185321 - DNA, 17 bp, Arabidopsis thaliana
ttttgtagacgttggtt

SEQ ID NO: 185322 - DNA, 17 bp, Arabidopsis thaliana
ttttgtcgctaagattc

SEQ ID NO: 185323 - DNA, 17 bp, Arabidopsis thaliana
ttttgtcggaaaattca

SEQ ID NO: 185324 - DNA, 17 bp, Arabidopsis thaliana
ttttgtctacaattttg

SEQ ID NO: 185325 - DNA, 17 bp, Arabidopsis thaliana
ttttgtctgattttttt

SEQ ID NO: 185326 - DNA, 17 bp, Arabidopsis thaliana
ttttgtgccaatatttt

SEQ ID NO: 185327 - DNA, 17 bp, Arabidopsis thaliana
ttttgtgcttgaatcta

SEQ ID NO: 185328 - DNA, 17 bp, Arabidopsis thaliana
ttttgtggactatgaat

SEQ ID NO: 185329 - DNA, 17 bp, Arabidopsis thaliana
ttttgtgtaccaaagca

SEQ ID NO: 185330 - DNA, 17 bp, Arabidopsis thaliana
ttttgtgtaccaaagct

SEQ ID NO: 185331 - DNA, 17 bp, Arabidopsis thaliana
ttttgtgttgaatttgc

SEQ ID NO: 185332 - DNA, 17 bp, Arabidopsis thaliana
ttttgttatttggatgc

SEQ ID NO: 185333 - DNA, 17 bp, Arabidopsis thaliana
ttttgttccttcttctg

SEQ ID NO: 185334 - DNA, 17 bp, Arabidopsis thaliana
ttttgttctgttcgacc

SEQ ID NO: 185335 - DNA, 17 bp, Arabidopsis thaliana
ttttgttgagaactttg

SEQ ID NO: 185336 - DNA, 17 bp, Arabidopsis thaliana
ttttgttgtctgttcga

SEQ ID NO: 185337 - DNA, 17 bp, Arabidopsis thaliana
ttttgtttaccagtttg

SEQ ID NO: 185338 - DNA, 17 bp, Arabidopsis thaliana
ttttgttttcggggttt

SEQ ID NO: 185339 - DNA, 17 bp, Arabidopsis thaliana
tttttaccattttcatt

SEQ ID NO: 185340 - DNA, 17 bp, Arabidopsis thaliana
tttttacgtataatatc

SEQ ID NO: 185341 - DNA, 17 bp, Arabidopsis thaliana
tttttactttgatggtt

SEQ ID NO: 185342 - DNA, 17 bp, Arabidopsis thaliana
tttttcacaaacttgat

SEQ ID NO: 185343 - DNA, 17 bp, Arabidopsis thaliana
tttttcctactccgccc

SEQ ID NO: 185344 - DNA, 17 bp, Arabidopsis thaliana
tttttcgaatcttagcg

SEQ ID NO: 185345 - DNA, 17 bp, Arabidopsis thaliana
tttttcgacaagtttgc

SEQ ID NO: 185346 - DNA, 17 bp, Arabidopsis thaliana
tttttcgccatctattt

SEQ ID NO: 185347 - DNA, 17 bp, Arabidopsis thaliana
tttttcgcctcttctaa

SEQ ID NO: 185348 - DNA, 17 bp, Arabidopsis thaliana
tttttctactatcctgg

SEQ ID NO: 185349 - DNA, 17 bp, Arabidopsis thaliana
tttttctactttttcta

SEQ ID NO: 185350 - DNA, 17 bp, Arabidopsis thaliana
tttttctgcaactatga

SEQ ID NO: 185351 - DNA, 17 bp, Arabidopsis thaliana
tttttcttgaccttgta

SEQ ID NO: 185352 - DNA, 17 bp, Arabidopsis thaliana
tttttcttgacctttta

SEQ ID NO: 185353 - DNA, 17 bp, Arabidopsis thaliana
tttttgacccaggtgac

SEQ ID NO: 185354 - DNA, 17 bp, Arabidopsis thaliana
tttttgagacaaataaa

SEQ ID NO: 185355 - DNA, 17 bp, Arabidopsis thaliana
tttttgagacaaatcat

SEQ ID NO: 185356 - DNA, 17 bp, Arabidopsis thaliana
tttttgctgcaactctt

SEQ ID NO: 185357 - DNA, 17 bp, Arabidopsis thaliana
tttttggacaggtatcg

SEQ ID NO: 185358 - DNA, 17 bp, Arabidopsis thaliana
tttttggacttttttgt

SEQ ID NO: 185359 - DNA, 17 bp, Arabidopsis thaliana
tttttggccaacgtcgt

SEQ ID NO: 185360 - DNA, 17 bp, Arabidopsis thaliana
tttttggtcaatacttg

SEQ ID NO: 185361 - DNA, 17 bp, Arabidopsis thaliana
tttttggtcaatacttt

SEQ ID NO: 185362 - DNA, 17 bp, Arabidopsis thaliana
tttttggtcccaaggct

SEQ ID NO: 185363 - DNA, 17 bp, Arabidopsis thaliana
tttttggtgacaagacc

SEQ ID NO: 185364 - DNA, 17 bp, Arabidopsis thaliana
tttttggttccgttttc

SEQ ID NO: 185365 - DNA, 17 bp, Arabidopsis thaliana
tttttgtagacgttgac

SEQ ID NO: 185366 - DNA, 17 bp, Arabidopsis thaliana
tttttgtagttgcaaag

SEQ ID NO: 185367 - DNA, 17 bp, Arabidopsis thaliana
tttttgtctgatttttt

SEQ ID NO: 185368 - DNA, 17 bp, Arabidopsis thaliana
tttttgtttgtattata

SEQ ID NO: 185369 - DNA, 17 bp, Arabidopsis thaliana
ttttttaaaaatttgac

SEQ ID NO: 185370 - DNA, 17 bp, Arabidopsis thaliana
ttttttaaaatttttac

SEQ ID NO: 185371 - DNA, 17 bp, Arabidopsis thaliana
ttttttaccattttcat

SEQ ID NO: 185372 - DNA, 17 bp, Arabidopsis thaliana
ttttttacggggataag

SEQ ID NO: 185373 - DNA, 17 bp, Arabidopsis thaliana
ttttttcacaaacttaa

SEQ ID NO: 185374 - DNA, 17 bp, Arabidopsis thaliana
ttttttctgagagaacc

SEQ ID NO: 185375 - DNA, 17 bp, Arabidopsis thaliana
ttttttcttaaatgacc

SEQ ID NO: 185376 - DNA, 17 bp, Arabidopsis thaliana
ttttttctttggagggt

SEQ ID NO: 185377 - DNA, 17 bp, Arabidopsis thaliana
ttttttgagacaaatca

SEQ ID NO: 185378 - DNA, 17 bp, Arabidopsis thaliana
ttttttggataccaaaa

SEQ ID NO: 185379 - DNA, 17 bp, Arabidopsis thaliana
ttttttgtagacgttga

SEQ ID NO: 185380 - DNA, 17 bp, Arabidopsis thaliana
ttttttgtccagtatct

SEQ ID NO: 185381 - DNA, 17 bp, Arabidopsis thaliana
ttttttgtctgttcgac

SEQ ID NO: 185382 - DNA, 17 bp, Arabidopsis thaliana
tttttttaaagttttac

SEQ ID NO: 185383 - DNA, 17 bp, Arabidopsis thaliana
tttttttaaatgaccgc

SEQ ID NO: 185384 - DNA, 17 bp, Arabidopsis thaliana
tttttttctataatcgg

SEQ ID NO: 185385 - DNA, 17 bp, Arabidopsis thaliana
tttttttcttaaatgac

SEQ ID NO: 185386 - DNA, 17 bp, Arabidopsis thaliana
tttttttcttgaccttg

SEQ ID NO: 185387 - DNA, 17 bp, Arabidopsis thaliana
tttttttcttttctttg

SEQ ID NO: 185388 - DNA, 17 bp, Arabidopsis thaliana
tttttttgagagacaaa

SEQ ID NO: 185389 - DNA, 17 bp, Arabidopsis thaliana
tttttttgtctgatttt

SEQ ID NO: 185390 - DNA, 17 bp, Arabidopsis thaliana
ttttttttctgtagata

SEQ ID NO: 185391 - DNA, 17 bp, Arabidopsis thaliana
tttttttttacaaagga

SEQ ID NO: 185392 - DNA, 17 bp, Arabidopsis thaliana
tttttttttccgaaaga

SEQ ID NO: 185393 - DNA, 17 bp, Arabidopsis thaliana
tttttttttcttttgac

SEQ ID NO: 185394 - DNA, 17 bp, Arabidopsis thaliana
ttttttttttggttttc

SEQ ID NO: 185395 - DNA, 17 bp, Arabidopsis thaliana
ttttttttttttacagg

SEQ ID NO: 185396 - DNA, 17 bp, Arabidopsis thaliana
ttttttttttttttttt

SEQ ID NO: 185397 - DNA, 21 bp, Arabidopsis thaliana
tgagcctctgtggtagccctc

SEQ ID NO: 185398 - DNA, 21 bp, Arabidopsis thaliana
tttttcctactccgcccatac

SEQ ID NO: 185399 - DNA, 21 bp, Arabidopsis thaliana
tttgcttccagcttttgtctc

SEQ ID NO: 185400 - DNA, 21 bp, Arabidopsis thaliana
ttggttacccatatggccatc

SEQ ID NO: 185401 - DNA, 21 bp, Arabidopsis thaliana
ttcgatgtctagcagtgccaa

SEQ ID NO: 185402 - DNA, 21 bp, Arabidopsis thaliana
tctaagtcttctattgatgtt

SEQ ID NO: 185403 - DNA, 21 bp, Arabidopsis thaliana
tacgcattgagtttcgttgct

SEQ ID NO: 185404 - DNA, 21 bp, Arabidopsis thaliana
tggcttggtttatgtacaccg

SEQ ID NO: 185405 - DNA, 21 bp, Arabidopsis thaliana
ttctgctatgttgctgctcat

SEQ ID NO: 185406 - DNA, 21 bp, Arabidopsis thaliana
tttcttcgtgaatatctggca

SEQ ID NO: 185407 - DNA, 21 bp, Arabidopsis thaliana
ttagagttttctggatactta

SEQ ID NO: 185408 - DNA, 21 bp, Arabidopsis thaliana
acaaacaccttggatgttctt

SEQ ID NO: 185409 - DNA, 21 bp, Arabidopsis thaliana
aagctttgctcgttcatgttc

SEQ ID NO: 185410 - DNA, 21 bp, Arabidopsis thaliana
aggaccattgcggttgtgcaa

SEQ ID NO: 185411 - DNA, 21 bp, Arabidopsis thaliana
tgcgggaagcatttgcacatg

SEQ ID NO: 185412 - DNA, 21 bp, Arabidopsis thaliana
taccgcaagatcaaagttcac

SEQ ID NO: 185413 - DNA, 21 bp, Arabidopsis thaliana
caactccaggattggaccagt
